(19) United States
(12) Patent Application Publication
(10) Pub. No.: US 2023/0113866 A1
(43) Pub. Date: Apr. 13, 2023

(54) Methods Of Treating Clonal Hematopoiesis Of Indeterminate Potential (CHIP) With Lymphocyte Antigen 75 (LY75), Cluster Of Differentiation 164 (CD164), Or Poly(ADP-Ribose) Polymerase 1 (PARP1) Inhibitors

(71) Applicant: Regeneron Pharmaceuticals, Inc., Tarrytown, NY (US)

(72) Inventors: Eric Jorgenson, Tarrytown, NY (US); Michael Kessler, Tarrytown, NY (US); Amy Damask, Tarrytown, NY (US); Sean O'Keeffe, Tarrytown, NY (US); Ryan White, Tarrytown, NY (US); David Glass, Tarrytown, NY (US)

(21) Appl. No.: 17/931,396

(22) Filed: Sep. 12, 2022

Related U.S. Application Data
(60) Provisional application No. 63/243,564, filed on Sep. 13, 2021.
(60) Provisional application No. 63/271,171, filed on Oct. 24, 2021.

(51) Int. Cl. C12N 15/113; C12Q 1/6883; A61K 31/7105

(52) U.S. Cl. CPC C12N 15/113; C12Q 1/6883; A61K 31/7105; C12Q 2600/156; C12N 2310/14; C12N 2310/20

(57) ABSTRACT

Methods of treating subjects having clonal hematopoiesis of indeterminate potential (CHIP) with lymphocyte antigen 75 (LY75), Cluster of Differentiation 164 (CD164), or Poly(ADP-Ribose) Polymerase 1 (PARP1) inhibitors, and methods of identifying subjects having an increased risk of developing CHIP are provided herein.

### REFERENCE TO SEQUENCE LISTING

[0001] This application includes a Sequence Listing filed electronically as an XML file named 381203582SEQ, created on Sep. 11, 2022, with a size of 1,547 kilobytes. The Sequence Listing is incorporated herein by reference.

### FIELD

[0002] The present disclosure relates generally to the treatment of subjects having clonal hematopoiesis of indeterminate potential (CHIP) with Lymphocyte Antigen 75 (LY75), Cluster of Differentiation 164 (CD164), or Poly(ADP-Ribose) Polymerase 1 (PARP1) inhibitors, and methods of identifying subjects having an increased risk of developing CHIP.

### BACKGROUND

[0003] CHIP is a genetically defined phenotype reflecting age-related changes to hematopoietic stem cells (HSCs). As a person ages, their HSCs accumulate mutations as a result of DNA replication error and DNA damage repair (so called somatic mutations, such as those acquired after birth). Thus, prevalence rises with age and is roughly 10% among persons aged 70 to 80. Patients undergoing molecular genetic investigation for cytopenia (anemia, leukopenia, thrombocytopenia) are the most likely to be given this diagnosis. Some of these mutations confer growth advantages, which result in: increased proliferation of these cells relative to other cells, increase in frequency of these mutations, and accumulation of additional mutations that drive neoplastic changes. A subset of genes are strongly recurrently mutated along with clonal hematopoiesis; these are considered “CHIP genes” and they include: DNA Methyltransferase 3 Alpha (DNMT3A), Tet Methylcytosine Dioxygenase 2 (TET2), ASXL Transcriptional Regulator 1 (ASXL1), Janus kinase 2 (JAK2), and Splicing factor 3B subunit 1 (SF3B1). CpG=>TpG mutations are very common in CHIP. In addition to the identification in blood DNA of specific recurrent mutations, the clinical definition of CHIP requires the absence of dysplasia and leukemia (<20% blasts). CHIP is associated with increased risk of hematologic cancers, such as myeloid or lymphoid neoplasia, and with increased risk of atherosclerotic cardiovascular disease, such as coronary heart disease, myocardial infarction, and severe calcified aortic valve stenosis.

[0004] LY75 is an endocytic receptor that captures antigens from the extracellular space and directs them to a specialized antigen-processing compartment for antigen processing, presentation, and cross-presentation. LY75 can cause reduced proliferation of B-lymphocytes. LY75 is expressed on human dendritic cells, monocytes, B cells, T cells, NK cells, and thymic epithelial cells.

[0005] CD164 is an adhesive glycoprotein expressed by HSCs and bone marrow stromal cells that acts as a regulator of hematopoiesis. CD164 belongs to the sialomucin family of secreted or membrane-associated mucins that regulate proliferation, adhesion, and migration of HSCs.

[0006] PARP1 is a DNA repair protein involved in PAR polymerization, and recruitments an array of repair molecules to support single and double strand repair, and chromatin remodeling in the context of NER. PARP1 modifies various nuclear proteins by poly(ADP-ribosyl)ation of glutamate, aspartate, serine, or tyrosine residues. The modification is dependent on DNA and is involved in the regulation of various important cellular processes such as differentiation, proliferation, and tumor transformation and also in the regulation of the molecular events involved in the recovery of cells from DNA damage.

### SUMMARY

[0007] The present disclosure provides methods of preventing or reducing the development of CHIP in a subject, the methods comprising administering an LY75 inhibitor, a CD164 inhibitor, or a PARP1 inhibitor, or any combination thereof, to the subject.

[0008] The present disclosure also provides methods of treating a subject with a therapeutic agent that prevents or reduces development of CHIP, wherein the subject has CHIP or is at risk of developing CHIP, the methods comprising the steps of: determining whether the subject has an LY75 variant nucleic acid molecule, a CD164 variant nucleic acid molecule, and/or a PARP1 variant nucleic acid molecule by: obtaining or having obtained a biological sample from the subject; and performing or having performed a sequence analysis on the biological sample to determine if the subject has a genotype comprising the LY75 variant nucleic acid molecule, the CD164 variant nucleic acid molecule, and/or the PARP1 variant nucleic acid molecule; and administering or continuing to administer the therapeutic agent that prevents or reduces development of CHIP in a standard dosage amount to a subject that is LY75 reference, CD164 reference, and/or PARP1 reference, and/or administering an LY75 inhibitor, a CD164 inhibitor, or a PARP1 inhibitor, or any combination thereof, to the subject; administering or continuing to administer the therapeutic agent that prevents or reduces development of CHIP in an amount that is the same as or less than a standard dosage amount to a subject that is heterozygous for the LY75 variant nucleic acid molecule, the CD164 variant nucleic acid molecule, and/or the PARP1 variant nucleic acid molecule, and/or administering an LY75 inhibitor, a CD164 inhibitor, or a PARP1 inhibitor, or any combination thereof, to the subject; or administering or continuing to administer the therapeutic agent that prevents or reduces development of CHIP in an amount that is the same as or less than a standard dosage amount to a subject that is homozygous for the LY75 variant nucleic acid molecule, the CD164 variant nucleic acid molecule, and/or the PARP1 variant nucleic acid molecule; wherein the presence of a genotype having the LY75 variant nucleic acid molecule, the CD164 variant nucleic acid molecule, and/or the PARP1 variant nucleic acid molecule indicates the subject has a decreased risk of developing CHIP.

[0009] The present disclosure also provides methods of identifying a subject having an increased risk of developing CHIP, the methods comprising: determining or having determined the presence or absence of an LY75 variant nucleic acid molecule, a CD164 variant nucleic acid molecule, and/or a PARP1 variant nucleic acid molecule in a biological sample obtained from the subject; wherein: when the subject is LY75 reference, CD164 reference, and/or PARP1 reference, then the subject has an increased risk of developing CHIP; and when the subject is heterozygous or homozygous for the LY75 variant nucleic acid molecule, the CD164 variant nucleic acid molecule, and/or the PARP1 variant nucleic acid molecule, then the subject has a decreased risk of developing CHIP.

[0010] The present disclosure also provides therapeutic agents that prevent or reduce CHIP for use in the prevention or reduction of CHIP in a subject identified as having: an LY75 variant genomic nucleic acid molecule, a CD164 variant genomic nucleic acid molecule, and/or a PARP1 variant genomic nucleic acid molecule; an LY75 variant mRNA molecule, a CD164 variant mRNA molecule, and/or a PARP1 variant mRNA molecule; or an LY75 variant cDNA molecule, a CD164 variant cDNA molecule, and/or a PARP1 variant cDNA molecule.

[0011] The present disclosure also provides an LY75 inhibitor for use in the prevention or reduction of CHIP in a subject that: a) is reference for an LY75 genomic nucleic acid molecule, an LY75 mRNA molecule, or an LY75 cDNA molecule; or b) is heterozygous for: i) an LY75 variant genomic nucleic acid molecule; ii) an LY75 variant mRNA molecule; or iii) an LY75 variant cDNA molecule.

[0012] The present disclosure also provides a CD164 inhibitor for use in the prevention or reduction of CHIP in a subject that: a) is reference fora CD164 genomic nucleic acid molecule, a CD164 mRNA molecule, or a CD164 cDNA molecule; or b) is heterozygous for: i) a CD164 variant genomic nucleic acid molecule; ii) a CD164 variant mRNA molecule; or iii) a CD164 variant cDNA molecule.

[0013] The present disclosure also provides a PARP1 inhibitor for use in the prevention or reduction of CHIP in a subject that: a) is reference fora PARP1 genomic nucleic acid molecule, a PARP1 mRNA molecule, or a PARP1 cDNA molecule; or b) is heterozygous for: i) a PARP1 variant genomic nucleic acid molecule; ii) a PARP1 variant mRNA molecule; or iii) a PARP1 variant cDNA molecule.

[0014] The present disclosure also provides methods of identifying a subject at risk of developing lung cancer, the method comprising: determining or having determined the presence or absence of one or more CHIP somatic mutations in DNA Methyltransferase 3 Alpha (DNMT3A) and/or ASXL Transcriptional Regulator 1 (ASXL1) in a biological sample obtained from the subject; wherein: when the subject has a CHIP somatic mutation in DNMT3A and/or ASXL1, the subject has an increased risk of developing lung cancer; and when the subject does not have a CHIP somatic mutation in DNMT3A and/or ASXL1, the subject does not have an increased risk of developing lung cancer.

### BRIEF DESCRIPTION OF THE DRAWINGS

[0015] The accompanying figures, which are incorporated in and constitute a part of this specification, illustrate several features of the present disclosure.

[0016] The patent or application file contains at least one drawing executed in color. Copies of this patent or patent application publication with color drawing(s) will be provided by the Office upon request and payment of the necessary fee.

[0017] FIG. 1 shows LY75 burden masks analysis of CHIP risk.

[0018] FIG. 2 shows the effect of the ly75 locus stratified by CHIP gene mutation carrier.

[0019] FIG. 3 shows CHIP minus malignant blood LY75-CD302 masks.

[0020] FIG. 4 shows that the PARP 1:226367601:A:C missense variant significantly associated with CHIP.

[0021] FIG. 5 shows PARP missense variants significantly associate with CHIP.

[0022] FIG. 6 shows that CHIP carriers are at an elevated risk of developing solid tumors.

[0023] FIG. 7 shows functional modeling of identified CHIP-G WAS locus; Panels A and B show systematic tracking of HDR and INDEL percentages in PARPi treated cells; cells were treated with PARPi for 8 days and then subjected to Sanger sequencing across each locus to determine population dynamics; (Panel A) RPE-1 hTERT cells harboring CRISPR mediated knock-in of DNMT3A-R882H allele; (Panel B) CRISPR-mediated TET2-deficieny in HEK293T cells.

[0024] FIG. 8 shows Forest plots reflecting the protective associations of two LY75 missense variants (r578446341-A, r5147820690-T) with the DNMT3A-CHIPoverall CHIP phenotype in the UKB and GHS cohorts.

### DESCRIPTION

[0025] Various terms relating to aspects of the present disclosure are used throughout the specification and claims. Such terms are to be given their ordinary meaning in the art, unless otherwise indicated. Other specifically defined terms are to be construed in a mamer consistent with the definitions provided herein.

[0026] Unless otherwise expressly stated, it is in no way intended that any method or aspect set forth herein be construed as requiring that its steps be performed in a specific order. Accordingly, where a method claim does not specifically state in the claims or descriptions that the steps are to be limited to a specific order, it is in no way intended that an order be inferred, in any respect. This holds for any possible non-expressed basis for interpretation, including matters of logic with respect to arrangement of steps or operational flow, plain meaning derived from grammatical organization or punctuation, or the number or type of aspects described in the specification.

[0027] As used herein, the singular forms “a,” “an” and “the” include plural referents unless the context clearly dictates otherwise.

[0028] As used herein, the term “about” means that the recited numerical value is approximate and small variations would not significantly affect the practice of the disclosed embodiments. Where a numerical value is used, unless indicated otherwise by the context, the term “about” means the numerical value can vary by ±10% and remain within the scope of the disclosed embodiments.

[0029] As used herein, the term “comprising” may be replaced with “consisting” or “consisting essentially of” in particular embodiments as desired.

[0030] As used herein, the term “isolated”, in regard to a nucleic acid molecule or a polypeptide, means that the nucleic acid molecule or polypeptide is in a condition other than its native environment, such as apart from blood and/or animal tissue. In some embodiments, an isolated nucleic acid molecule or polypeptide is substantially free of other nucleic acid molecules or other polypeptides, particularly other nucleic acid molecules or polypeptides of animal origin. In some embodiments, the nucleic acid molecule or polypeptide can be in a highly purified form, i.e., greater than 95% pure or greater than 99% pure. When used in this context, the term “isolated” does not exclude the presence of the same nucleic acid molecule or polypeptide in alternative physical forms, such as dimers or Alternately phosphorylated or derivatized forms.

[0031] As used herein, the terms “nucleic acid”, “nucleic acid molecule”, “nucleic acid sequence”, “polynucleotide”, or “oligonucleotide” can comprise a polymeric form of nucleotides of any length, can comprise DNA and/or RNA, and can be single-stranded, double-stranded, or multiple stranded. One strand of a nucleic acid also refers to its complement.

[0032] As used herein, the term “subject” includes any animal, including mammals. Mammals include, but are not limited to, farm animals (such as, for example, horse, cow, pig), companion animals (such as, for example, dog, cat), laboratory animals (such as, for example, mouse, rat, rabbits), and non-human primates. In some embodiments, the subject is a human. In some embodiments, the human is a patient under the care of a physician.

[0033] It has been observed in accordance with the present disclosure that an LY75 variant nucleic acid molecule, a CD164 variant nucleic acid molecule, and a PARP1 variant nucleic acid molecule (whether these variations are homozygous or heterozygous in a particular subject) associate with a decreased risk of developing CHIP or CHIP-related disorders. The identification by the present disclosure of the association between additional variants and gene burden masks indicates that one or more of LY75, CD164, and PARP1 themselves (rather than linkage disequilibrium with variants in another gene) are responsible for a protective effect in CHI) and CHIP-related disorders.

[0034] Therefore, subjects that are LY75 reference, or heterozygous for an LY75 variant nucleic acid molecule, may be treated with an LY75 inhibitor; subjects that are CD164 reference, or heterozygous for a CD164 variant nucleic acid molecule, may be treated with a CD164 inhibitor; and subjects that are PARP1 reference, or heterozygous for a PARP1 variant nucleic acid molecules, may be treated with a PARP1 inhibitor, such that CHIP is prevented or inhibited and CHIP-related disorders are inhibited or prevented, the symptoms thereof are reduced or prevented, and/or development of symptoms is repressed or prevented. It is also believed that such subjects having CHIP may further be treated with therapeutic agents that treat or inhibit CHIP or CHIP-related disorders.

[0035] For purposes of the present disclosure, any particular subject, such as a human, can be categorized as having one of three LY75 genotypes: i) LY75 reference; ii) heterozygous for an LY75 variant nucleic acid molecule; or iii) homozygous for an LY75 variant nucleic acid molecule. A subject is LY75 reference when the subject does not have a copy of an LY75 variant nucleic acid molecule. A subject is heterozygous for an LY75 variant nucleic acid molecule when the subject has a single copy of an LY75 variant nucleic acid molecule.

[0036] In any of the embodiments described herein, an LY75 variant nucleic acid molecule is any nucleic acid molecule (such as, a genomic nucleic acid molecule, an mRNA molecule, or a cDNA molecule) that is a missense variant, a splice-site variant, a stop-gain variant, a start-loss variant, a stop-loss variant, a frameshift variant, an in-frame indel variant, or a variant that encodes a truncated LY75 polypeptide. In any of the embodiments described herein, an LY75 variant nucleic acid molecule can also be any nucleic acid molecule (such as, a genomic nucleic acid molecule, an mRNA molecule, or a cDNA molecule) that encodes an LY75 polypeptide having a partial loss-of-function, a complete loss-of-function, a predicted partial loss-of-function, or a predicted complete loss-of-function. A subject who has an LY75 polypeptide having a partial loss-of-function (or predicted partial loss-of-function) is hypomorphic for LY75. A subject is homozygous for an LY75 variant nucleic acid molecule when the subject has two copies (same or different) of an LY75 variant nucleic acid molecule.

[0037] For purposes of the present disclosure, any particular subject, such as a human, can be categorized as having one of three CD164 genotypes: i) CD164 reference; ii) heterozygous for a CD164 variant nucleic acid molecule; or iii) homozygous for a CD164 variant nucleic acid molecule. A subject is CD164 reference when the subject does not have a copy of a CD164 variant nucleic acid molecule. A subject is heterozygous for a CD164 variant nucleic acid molecule when the subject has a single copy of a CD164 variant nucleic acid molecule.

[0038] In any of the embodiments described herein, a CD164 variant nucleic acid molecule is any nucleic acid molecule (such as, a genomic nucleic acid molecule, an mRNA molecule, or a cDNA molecule) that is a missense variant, a splice-site variant, a stop-gain variant, a start-loss variant, a stop-loss variant, a frameshift variant, an in-frame indel variant, or a variant that encodes a truncated CD164 polypeptide. In any of the embodiments described herein, a CD164 variant nucleic acid molecule can also be any nucleic acid molecule (such as, a genomic nucleic acid molecule, an mRNA molecule, or a cDNA molecule) that encodes a CD164 polypeptide having a partial loss-of-function, a complete loss-of-function, a predicted partial loss-of-function, or a predicted complete loss-of-function. A subject who has a CD164 polypeptide having a partial loss-of-function (or predicted partial loss-of-function) is hypomorphic for CD164. A subject is homozygous for a CD164 variant nucleic acid molecule when the subject has two copies (same or different) of a CD164 variant nucleic acid molecule.

[0039] For purposes of the present disclosure, any particular subject, such as a human, can be categorized as having one of three PARP1 genotypes: i) PARP1 reference; ii) heterozygous for a PARP1 variant nucleic acid molecule; or iii) homozygous for a CD164 variant nucleic acid molecule. A subject is PARP1 reference when the subject does not have a copy of a PARP1 variant nucleic acid molecule. A subject is heterozygous for a PARP1 variant nucleic acid molecule when the subject has a single copy of a PARP1 variant nucleic acid molecule.

[0040] In any of the embodiments described herein, a PARP1 variant nucleic acid molecule is any nucleic acid molecule (such as, a genomic nucleic acid molecule, an mRNA molecule, or a cDNA molecule) that is a missense variant, a splice-site variant, a stop-gain variant, a start-loss variant, a stop-loss variant, a frameshift variant, an in-frame indel variant, or a variant that encodes a truncated PARP1 polypeptide. In any of the embodiments described herein, a PARP1 variant nucleic acid molecule can also be any nucleic acid molecule (such as, a genomic nucleic acid molecule, an mRNA molecule, or a cDNA molecule) that encodes a PARP1 polypeptide having a partial loss-of-function, a complete loss-of-function, a predicted partial loss-of-function, or a predicted complete loss-of-function. A subject who has a PARP1 polypeptide having a partial loss-of-function (or predicted partial loss-of-function) is hypomorphic for PARP1. A subject is homozygous for a PARP1 variant nucleic acid molecule when the subject has two copies (same or different) of a PARP1 variant nucleic acid molecule.

[0041] For subjects that are genotyped or determined to be LY75, CD164, and PARP1 reference, such subjects have an increased risk of developing CHIP and CHIP-related disorders, such as a hematologic cancer, a myeloid neoplasia, a lymphoid neoplasia, an atherosclerotic cardiovascular disease, a coronary heart disease, a myocardial infarction, and/or a severe calcified aortic valve stenosis. For subjects that are genotyped or determined to be either LY75, CD164, and PARP1 reference or heterozygous for one or more LY75, CD164, or PARP1 variant nucleic acid molecules, such subject or subjects can be treated with an LY75 inhibitor, a CD164 inhibitor, or a PARP1 inhibitor, or any combination thereof.

[0042] In any of the embodiments described herein, the subject in whom CHIP is prevented or reduced by administering an LY75 inhibitor, a CD164 inhibitor, or a PARP1 inhibitor, or any combination thereof, can be anyone at risk for developing CHIP including, but not limited to, subjects with CHIP-related disorders. In addition, in some embodiments, the subject is at risk of developing CHIP. In some embodiments, administering an LY75 inhibitor, a CD164 inhibitor, or a PARP1 inhibitor, or any combination thereof, may be carried out to prevent development of an additional CHIP or CHIP-related disorders in a subject who has already had CHIP or a CHIP-related disorder.

[0043] In any of the embodiments described herein, the LY75 variant nucleic acid molecule can be any nucleic acid molecule (such as, for example, genomic nucleic acid molecule, mRNA molecule, or cDNA molecule) encoding an LY75 variant polypeptide having a partial loss-of-function, a complete loss-of-function, a predicted partial loss-of-function, or a predicted complete loss-of-function. In some embodiments, the LY75 variant nucleic acid molecules encoding an LY75 predicted loss-of-function polypeptide is associated with a reduced in vitro response to LY75 ligands compared with reference LY75. In some embodiments, the LY75 variant nucleic acid molecules encoding an LY75 predicted loss-of-function polypeptide is an LY75 variant that results or is predicted to result in a premature truncation of an LY75 polypeptide compared to the human reference genome sequence.

[0044] In any of the embodiments described herein, the CD164 variant nucleic acid molecule can be any nucleic acid molecule (such as, for example, genomic nucleic acid molecule, mRNA molecule, or cDNA molecule) encoding a CD164 variant polypeptide having a partial loss-of-function, a complete loss-of-function, a predicted partial loss-of-function, or a predicted complete loss-of-function. In some embodiments, the CD164 variant nucleic acid molecules encoding a CD164 predicted loss-of-function polypeptide is associated with a reduced in vitro response to CD164 ligands compared with reference CD164. In some embodiments, the CD164 variant nucleic acid molecules encoding a CD164 predicted loss-of-function polypeptide is a CD164 variant that results or is predicted to result in a premature truncation of a CD164 polypeptide compared to the human reference genome sequence.

[0045] In any of the embodiments described herein, the PARP1 variant nucleic acid molecule can be any nucleic acid molecule (such as, for example, genomic nucleic acid molecule, mRNA molecule, or cDNA molecule) encoding a PARP1 variant polypeptide having a partial loss-of-function, a complete loss-of-function, a predicted partial loss-of-function, or a predicted complete loss-of-function. In some embodiments, the PARP1 variant nucleic acid molecules encoding a PARP1 predicted loss-of-function polypeptide is associated with a reduced in vitro response to PARP1 ligands compared with reference PARP1. In some embodiments, the PARP1 variant nucleic acid molecules encoding a PARP1 predicted loss-of-function polypeptide is a PARP1 variant that results or is predicted to result in a premature truncation of a PARP1 polypeptide compared to the human reference genome sequence.

[0046] In some embodiments, the LY75, CD164, or PARP1 variant nucleic acid molecules are variants that are predicted to be damaging by in vitro prediction algorithms such as Polyphen, SIFT, or similar algorithms.

[0047] In some embodiments, the LY75 variant nucleic acid molecules are variants that cause or are predicted to cause a nonsynonymous amino-acid substitution in an LY75 nucleic acid molecule and whose allele frequency is less than 1/100 alleles in the population from which the subject is selected. In some embodiments, the LY75 variant nucleic acid molecule is any rare variant (allele frequency <0.1%; or 1 in 1,000 alleles), or any splice-site, stop-gain, start-loss, stop-loss, frameshift, or in-frame indel, or other frameshift LY75 variant.

[0048] In any of the embodiments described herein, the LY75 predicted loss-of-function polypeptide can be any LY75 polypeptide having a partial loss-of-function, a complete loss-of-function, a predicted partial loss-of-function, or a predicted complete loss-of-function.

[0049] In any of the embodiments described herein, the LY75 variant nucleic acid molecule can include variations at positions of chromosome 2 using the nucleotide sequence of the LY75 reference genomic nucleic acid molecule (SEQ ID NO:1; ENSG00000054219.11, chr2:159,803,355-159,904,756 or in the GRCh38/hg38 human genome assembly) as a reference sequence. Numerous genetic variants in LY75 exist which cause subsequent changes in the LY75 polypeptide sequence including, but not limited to rs78446341 (GRCh38/hg38 chr2:159,834,145:G:A) and rs147820690 (GRCh38/hg38 chr2:159,878,663:C:T).

[0050] In some embodiments, the CD164 variant nucleic acid molecules are variants that cause or are predicted to cause a nonsynonymous amino-acid substitution in CD164 nucleic acid molecules and whose allele frequency is less than 1/100 alleles in the population from which the subject is selected. In some embodiments, the CD164 variant nucleic acid molecules are any rare variant (allele frequency <0.1%; or 1 in 1,000 alleles), or any splice-site, stop-gain, start-loss, stop-loss, frameshift, or in-frame indel, or other frameshift CD164 variant.

[0051] In any of the embodiments described herein, the CD164 predicted loss-of-function polypeptide can be any CD164 polypeptide having a partial loss-of-function, a complete loss-of-function, a predicted partial loss-of-function, or a predicted complete loss-of-function.

[0052] In any of the embodiments described herein, the CD164 variant nucleic acid molecule can include variations at positions of chromosome 6 using the nucleotide sequence of the CD164 reference genomic nucleic acid molecule (SEQ ID NO:55; ENSG00000135535.17, chr6:109,366,514-109,381,739 in the GRCh38/hg38 human genome assembly) as a reference sequence. Numerous genetic variants in CD164 exist which cause subsequent changes in the CD164 polypeptide sequence including, but not limited to rs3799840 (GRCh38/hg38 chr6:109381443A:T).

[0053] In some embodiments, the PARP1 variant nucleic acid molecules are variants that cause or are predicted to cause a nonsynonymous amino-acid substitution in PARP1 nucleic acid molecules and whose allele frequency is less than 1/100 alleles in the population from which the subject is selected. In some embodiments, the PARP1 variant nucleic acid molecules are any rare variant (allele frequency <0.1%; or 1 in 1,000 alleles), or any splice-site, stop-gain, start-loss, stop-loss, frameshift, or in-frame indel, or other frameshift PARP1 variant.

[0054] In any of the embodiments described herein, the PARP1 predicted loss-of-function polypeptide can be any PARP1 polypeptide having a partial loss-of-function, a complete loss-of-function, a predicted partial loss-of-function, or a predicted complete loss-of-function.

[0055] In any of the embodiments described herein, the PARP1 variant nucleic acid molecule can include variations at positions of chromosome 1 using the nucleotide sequence of the PARP1 reference genomic nucleic acid molecule (SEQ ID NO:113; ENSG00000143799.14, chr1:226,360,691-226,408,093 in the GRCh38/hg38 human genome assembly) as a reference sequence. Numerous genetic variants in PARP1 exist which cause subsequent changes in the PARP1 polypeptide sequence including, but not limited to s1136410 (GRCh38/hg38 chr1:226367601:A:G), rs2793379 (GRCh38/hg38 chr1:226408985:T:A), rs2570367 (GRCh38/hg38 chr1:226414809T:C), rs1433574 (GRCh38/hg38 chr1:226421638:A:C)and rs2039925 (GRCh38/hg38chr1:226422811:C:G).

[0056] Any one or more (i.e., any combination) of the LY75, CD164, or PARP1 variant nucleic acid molecules can be used within any of the methods described herein to determine whether a subject has an increased risk of developing CHIP or a CHIP-related disorder. The combinations of particular variants can form a mask used for statistical analysis of the particular correlation of any one or more LY75, CD164, or PARP1 and decreased risk of developing CHIP.

[0057] In any of the embodiments described herein, the CHIP or CHIP-related disorder is a hematologic cancer, a myeloid neoplasia, a lymphoid neoplasia, an atherosclerotic cardiovascular disease, a coronary heart disease, a myocardial infarction, and/or a severe calcified aortic valve stenosis. In some embodiments, the CHIP or CHIP-related disorder is a hematologic cancer. In some embodiments, the CHIP or CHIP-related disorder is a myeloid neoplasia. In some embodiments, the the CHIP or CHIP-related disorder is a lymphoid neoplasia. In some embodiments, the CHIP or CHIP-related disorder is an atherosclerotic cardiovascular disease. In some embodiments, the CHIP or CHIP-related disorder is a coronary heart disease. In some embodiments, the CHIP or CHIP-related disorder is a myocardial infarction. In some embodiments, the CHIP or CHIP-related disorder is a severe calcified aortic valve stenosis.

[0058] Symptoms of myeloid neoplasia include, but are not limited to, fever, bone pain, lethargy and fatigue, shortness of breath, pale skin, frequent infections, easy bruising, and unusual bleeding, such as frequent nosebleeds and bleeding from the gums.

[0059] Symptoms of lymphoid neoplasia include, but are not limited to, painless swelling of lymph nodes in neck, armpits or groin, persistent fatigue, fever, night sweats, shortness of breath, unexplained weight loss, and itchy skin.

[0060] Symptoms of coronary heart disease include, but are not limited to, angina, cold sweats, dizziness, light-headedness, nausea or a feeling of indigestion, neck pain, shortness of breath (especially with activity), sleep disturbances, and weakness.

[0061] Symptoms of myocardial infarction include, but are not limited to, pressure or tightness in the chest, pain in the chest, back, jaw, and other areas of the upper body that lasts more than a few minutes or that goes away and comes back, shortness of breath, sweating, nausea, vomiting, anxiety, a cough, dizziness, and a fast heart rate.

[0062] Symptoms of severe calcified aortic valve stenosis include, but are not limited to, abnormal heart sound (heart murmur) heard through a stethoscope, chest pain (angina) or tightness (with activity), feeling faint or dizzy or fainting (with activity), shortness of breath, (especially with activity), fatigue (especially during times of increased activity), rapid, fluttering heartbeat (palpitations), not eating enough (mainly in children with aortic valve stenosis), and not gaining enough weight (mainly in children with aortic valve stenosis).

[0063] It has also been observed in accordance with the present disclosure that CHIP somatic mutations in either DNMT3A or ASXL1 associate with an increased risk of developing lung cancer. Therefore, subjects that have a CHIP somatic mutation in either DNMT3A or ASXL1 may be monitored more frequently for lung cancer pathology (such as by more frequent chest x-rays, or the like), treatment with palliative agents, or smoking cessation procedures, such that development of lung cancer is prevented or delayed.

[0064] In any of the embodiments described herein, a DNMT3A or an ASXL1 somatic mutation is any mutation that is a missense mutation, a splice-site mutation, a stop-gain mutation, a start-loss mutation, a stop-loss mutation, a frameshift mutation, an in-frame indel mutation, or a mutation that results in a truncated DNMT3A or ASXL1 polypeptide. In any of the embodiments described herein, a DNMT3A or an ASXL1 somatic mutation can also be any mutation that results in a DNMT3A or an ASXL1 polypeptide having a partial loss-of-function, a complete loss-of-function, a predicted partial loss-of-function, or a predicted complete loss-of-function.

[0065] In any of the embodiments described herein, the DNMT3A mutation can include variations at positions of chromosome 2 using the nucleotide sequence of the DNMT3A reference genomic nucleic acid molecule (SEQ ID NO:212; ENSG00000119772.17, chr2:25,227,855-25,342,590 in the GRCh38/hg38 human genome assembly) as a reference sequence.

[0066] In any of the embodiments described herein, the ASXL1 mutation can include variations at positions of chromosome 20 using the nucleotide sequence of the ASXL1 reference genomic nucleic acid molecule (SEQ ID NO:267; ENSG00000171456.20, chr20:32,358,330-32,439,260 in the GRCh38/hg38 human genome assembly) as a reference sequence.

[0067] The present disclosure provides methods of preventing or reducing the development of CHIP in a subject, the methods comprising administering an LY75 inhibitor, a CD164 inhibitor, or a PARP1 inhibitor, or any combination thereof, to the subject.

[0068] The present disclosure also provides methods of treating a subject having a hematologic cancer or at risk of developing a hematologic cancer, the methods comprising administering an LY75 inhibitor, or a CD164 inhibitor, or a PARP1 inhibitor, or any combination thereof, to the subject.

[0069] The present disclosure also provides methods of treating a subject having a myeloid neoplasia or at risk of developing a myeloid neoplasia, the methods comprising administering an LY75 inhibitor, or a CD164 inhibitor, or a PARP1 inhibitor, or any combination thereof, to the subject.

[0070] The present disclosure also provides methods of treating a subject having a lymphoid neoplasia or at risk of developing a lymphoid neoplasia, the methods comprising administering an LY75 inhibitor, or a CD164 inhibitor, or a PARP1 inhibitor, or any combination thereof, to the subject.

[0071] The present disclosure also provides methods of treating a subject having an atherosclerotic cardiovascular disease or at risk of developing an atherosclerotic cardiovascular disease, the methods comprising administering an LY75 inhibitor, or a CD164 inhibitor, or a PARP1 inhibitor, or any combination thereof, to the subject.

[0072] The present disclosure also provides methods of treating a subject having a coronary heart disease or at risk of developing a coronary heart disease, the methods comprising administering an LY75 inhibitor, or a CD164 inhibitor, or a PARP1 inhibitor, or any combination thereof, to the subject.

[0073] The present disclosure also provides methods of treating a subject who has or has had a myocardial infarction or at risk of developing a myocardial infarction, the methods comprising administering an LY75 inhibitor, or a CD164 inhibitor, or a PARP1 inhibitor, or any combination thereof, to the subject.

[0074] The present disclosure also provides methods of treating a subject having a severe calcified aortic valve stenosis or at risk of developing a severe calcified aortic valve stenosis, the methods comprising administering an LY75 inhibitor, or a CD164 inhibitor, or a PARP1 inhibitor, or any combination thereof, to the subject.

[0075] In some embodiments, the LY75 inhibitor comprises an inhibitory nucleic acid molecule. Examples of inhibitory nucleic acid molecules include, but are not limited to, antisense nucleic acid molecules, small interfering RNAs (siRNAs), and short hairpin RNAs (shRNAs). Such inhibitory nucleic acid molecules can be designed to target any region of an LY75 nucleic acid molecule. In some embodiments, the antisense RNA, siRNA, or shRNA hybridizes to a sequence within an LY75 genomic nucleic acid molecule or mRNA molecule and decreases expression of the LY75 polypeptide in a cell in the subject. In some embodiments, the LY75 inhibitor comprises an antisense molecule that hybridizes to an LY75 genomic nucleic acid molecule or mRNA molecule and decreases expression of the LY75 polypeptide in a cell in the subject. In some embodiments, the LY75 inhibitor comprises an siRNA that hybridizes to an LY75 genomic nucleic acid molecule or mRNA molecule and decreases expression of the LY75 polypeptide in a cell in the subject. In some embodiments, the LY75 inhibitor comprises an shRNA that hybridizes to an LY75 genomic nucleic acid molecule or mRNA molecule and decreases expression of the LY75 polypeptide in a cell in the subject.

[0076] In some embodiments, the CD164 inhibitor comprises an inhibitory nucleic acid molecule. Examples of inhibitory nucleic acid molecules include, but are not limited to, antisense nucleic acid molecules, small interfering RNAs (siRNAs), and short hairpin RNAs (shRNAs). Such inhibitory nucleic acid molecules can be designed to target any region of a CD164 nucleic acid molecule. In some embodiments, the antisense RNA, siRNA, or shRNA hybridizes to a sequence within a CD164 genomic nucleic acid molecule or mRNA molecule and decreases expression of the CD164 polypeptide in a cell in the subject. In some embodiments, the CD164 inhibitor comprises an antisense molecule that hybridizes to a CD164 genomic nucleic acid molecule or mRNA molecule and decreases expression of the CD164 polypeptide in a cell in the subject. In some embodiments, the CD164 inhibitor comprises an siRNA that hybridizes to a CD164 genomic nucleic acid molecule or mRNA molecule and decreases expression of the CD164 polypeptide in a cell in the subject. In some embodiments, the CD164 inhibitor comprises an shRNA that hybridizes to a CD164 genomic nucleic acid molecule or mRNA molecule and decreases expression of the CD164 polypeptide in a cell in the subject.

[0077] In some embodiments, the PARP1 inhibitor comprises an inhibitory nucleic acid molecule. Examples of inhibitory nucleic acid molecules include, but are not limited to, antisense nucleic acid molecules, small interfering RNAs (siRNAs), and short hairpin RNAs (shRNAs). Such inhibitory nucleic acid molecules can be designed to target any region of a PARP1 nucleic acid molecule. In some embodiments, the antisense RNA, siRNA, or shRNA hybridizes to a sequence within a PARP1 genomic nucleic acid molecule or mRNA molecule and decreases expression of the PARP1 polypeptide in a cell in the subject. In some embodiments, the PARP1 inhibitor comprises an antisense molecule that hybridizes to a PARP1 genomic nucleic acid molecule or mRNA molecule and decreases expression of the PARP1 polypeptide in a cell in the subject. In some embodiments, the PARP1 inhibitor comprises an siRNA that hybridizes to a PARP1 genomic nucleic acid molecule or mRNA molecule and decreases expression of the PARP1 polypeptide in a cell in the subject. In some embodiments, the PARP1 inhibitor comprises an shRNA that hybridizes to a PARP1 genomic nucleic acid molecule or mRNA molecule and decreases expression of the PARP1 polypeptide in a cell in the subject.

[0078] The inhibitory nucleic acid molecules can comprise RNA, DNA, or both RNA and DNA. The inhibitory nucleic acid molecules can also be linked or fused to a heterologous nucleic acid sequence, such as in a vector, or a heterologous label. For example, the inhibitory nucleic acid molecules can be within a vector or as an exogenous donor sequence comprising the inhibitory nucleic acid molecule and a heterologous nucleic acid sequence. The inhibitory nucleic acid molecules can also be linked or fused to a heterologous label. The label can be directly detectable (such as, for example, fluorophore) or indirectly detectable (such as, for example, hapten, enzyme, or fluorophore quencher). Such labels can be detectable by spectroscopic, photochemical, biochemical, immunochemical, or chemical means. Such labels include, for example, radiolabels, pigments, dyes, chromogens, spin labels, and fluorescent labels. The label can also be, for example, a chemiluminescent substance; a metal-containing substance; or an enzyme, where there occurs an enzyme-dependent secondary generation of signal. The term “label” can also refer to a “tag” or hapten that can bind selectively to a conjugated molecule such that the conjugated molecule, when added subsequently along with a substrate, is used to generate a detectable signal. For example, biotin can be used as a tag along with an avidin or streptavidin conjugate of horseradish peroxidate (HRP) to bind to the tag, and examined using a calorimetric substrate (such as, for example, tetramethylbenzidine (TMB)) or a fluorogenic substrate to detect the presence of HRP. Exemplary labels that can be used as tags to facilitate purification include, but are not limited to, myc, HA, FLAG or 3×FLAG, 6×His or polyhistidine, glutathione-S-transferase (GST), maltose binding protein, an epitope tag, or the Fc portion of immunoglobulin. Numerous labels include, for example, particles, fluorophores, haptens, enzymes and their calorimetric, fluorogenic and chemiluminescent substrates and other labels.

[0079] In any of the embodiments described herein, any of the inhibitory nucleic acid molecules can be formulated as a component of a lipid nanoparticle, and can be delivered to a cell by a lipid nanoparticle.

[0080] The inhibitory nucleic acid molecules can comprise, for example, nucleotides or non-natural or modified nucleotides, such as nucleotide analogs or nucleotide substitutes. Such nucleotides include a nucleotide that contains a modified base, sugar, or phosphate group, or that incorporates a non-natural moiety in its structure. Examples of non-natural nucleotides include, but are not limited to, dideoxynucleotides, biotinylated, aminated, deaminated, alkylated, benzylated, and fluorophor-labeled nucleotides.

[0081] The inhibitory nucleic acid molecules can also comprise one or more nucleotide analogs or substitutions. A nucleotide analog is a nucleotide which contains a modification to either the base, sugar, or phosphate moieties. Modifications to the base moiety include, but are not limited to, natural and synthetic modifications of A, C, G, and T/U, as well as different purine or pyrimidine bases such as, for example, pseudouridine, uracil-5-yl, hypoxanthin-9-yl (I), and 2-aminoadenin-9-yl. Modified bases include, but are not limited to, 5-methylcytosine (5-me-C), 5-hydroxymethyl cytosine, xanthine, hypoxanthine, 2-aminoadenine, 6-methyl and other alkyl derivatives of adenine and guanine, 2-propyl and other alkyl derivatives of adenine and guanine, 2-thiouracil, 2-thiothymine and 2-thiocytosine, 5-halouracil and cytosine, 5-propynyl uracil and cytosine, 6-azo uracil, cytosine and thymine, 5-uracil (pseudouracil), 4-thiouracil, 8-halo, 8-amino, 8-thiol, 8-thioalkyl, 8-hydroxyl and other 8-substituted adenines and guanines, 5-halo (such as, for example, 5-bromo), 5-trifluoromethyl and other 5-substituted uracils and cytosines, 7-methylguanine, 7-methyladenine, 8-azaguanine, 8-azaadenine, 7-deazaguanine, 7-deazaadenine, 3-deazaguanine, and 3-deazaadenine.

[0082] Nucleotide analogs can also include modifications of the sugar moiety. Modifications to the sugar moiety include, but are not limited to, natural modifications of the ribose and deoxy ribose as well as synthetic modifications. Sugar modifications include, but are not limited to, the following modifications at the 2′ position: OH; F; O-, S-, or N-alkyl; O-, S-, or N-alkenyl; O-, S- or N-alkynyl; or O-alkyl-O-alkyl, wherein the alkyl, alkenyl, and alkynyl may be substituted or unsubstituted C₁₋₁₀alkyl or C₂₋₁₀alkenyl, and C₂₋₁₀alkynyl. Exemplary 2′ sugar modifications also include, but are not limited to, —O[(CH₂)ₙO]ₘCH₃, —O(CH₂)ₙOCH₃, —O(CH₂)ₙNH₂, —O(CH₂)ₙCH₃, —O(CH₂)ₙ—ONH₂, and —O(CH₂)ₙON[(CH₂)ₙCH₃)]₂, where n and m, independently, are from 1 to about 10. Other modifications at the 2′ position include, but are not limited to, C₁₋₁₀alkyl, substituted lower alkyl, alkaryl, aralkyl, O-alkaryl or O-aralkyl, SH, SCH₃, OCN, Cl, Br, CN, CF₃, OCF₃, SOCH₃, SO₂CH₃, ONO₂, NO₂, N₃, NH₂, heterocycloalkyl, heterocycloalkaryl, aminoalkylamino, polyalkylamino, substituted silyl, an RNA cleaving group, a reporter group, an intercalator, a group for improving the pharmacokinetic properties of an oligonucleotide, or a group for improving the pharmacodynamic properties of an oligonucleotide, and other substituents having similar properties. Similar modifications may also be made at other positions on the sugar, particularly the 3′ position of the sugar on the 3′ terminal nucleotide or in 2′-5′ linked oligonucleotides and the 5′ position of 5′ terminal nucleotide. Modified sugars can also include those that contain modifications at the bridging ring oxygen, such as CH₂ and S. Nucleotide sugar analogs can also have sugar mimetics, such as cyclobutyl moieties in place of the pentofuranosyl sugar.

[0083] Nucleotide analogs can also be modified at the phosphate moiety. Modified phosphate moieties include, but are not limited to, those that can be modified so that the linkage between two nucleotides contains a phosphorothioate, chiral phosphorothioate, phosphorodithioate, phosphotriester, aminoalkylphosphotriester, methyl and other alkyl phosphonates including 3′-alkylene phosphonate and chiral phosphonates, phosphinates, phosphoramidates including 3′-amino phosphoramidate and aminoalkylphosphoramidates, thionophosphoramidates, thionoalkylphosphonates, thionoalkylphosphotriesters, and boranophosphates. These phosphate or modified phosphate linkage between two nucleotides can be through a 3′-5′ linkage or a 2′-5′ linkage, and the linkage can contain inverted polarity such as 3′-5′ to 5′-3′ or 2′-5′ to 5′-2′. Various salts, mixed salts, and free acid forms are also included. Nucleotide substitutes also include peptide nucleic acids (PNAs).

[0084] In some embodiments, the antisense nucleic acid molecules are gapmers, whereby the first one to seven nucleotides at the 5′ and 3′ ends each have 2′-methoxyethyl (2′-MOE) modifications. In some embodiments, the first five nucleotides at the 5′ and 3′ ends each have 2′-MOE modifications. In some embodiments, the first one to seven nucleotides at the 5′ and 3′ ends are RNA nucleotides. In some embodiments, the first five nucleotides at the 5′ and 3′ ends are RNA nucleotides. In some embodiments, each of the backbone linkages between the nucleotides is a phosphorothioate linkage.

[0085] In some embodiments, the siRNA molecules have termini modifications. In some embodiments, the 5′ end of the antisense strand is phosphorylated. In some embodiments, 5′-phosphate analogs that camot be hydrolyzed, such as 5′-(E)-vinyl-phosphonate are used.

[0086] In some embodiments, the siRNA molecules have backbone modifications. In some embodiments, the modified phosphodiester groups that link consecutive ribose nucleosides have been shown to enhance the stability and in vivo bioavailability of siRNAs The non-ester groups (—OH, ═O) of the phosphodiester linkage can be replaced with sulfur, boron, or acetate to give phosphorothioate, boranophosphate, and phosphonoacetate linkages. In addition, substituting the phosphodiester group with a phosphotriester can facilitate cellular uptake of siRNAs and retention on serum components by eliminating their negative charge. In some embodiments, the siRNA molecules have sugar modifications. In some embodiments, the sugars are deprotonated (reaction catalyzed by exo- and endonucleases) whereby the 2′-hydroxyl can act as a nucleophile and attack the adjacent phosphorous in the phosphodiester bond. Such alternatives include 2′-O-methyl, 2′-O-methoxyethyl, and 2′-fluoro modifications.

[0087] In some embodiments, the siRNA molecules have base modifications. In some embodiments, the bases can be substituted with modified bases such as pseudouridine, 5′-methylcytidine, N6-methyladenosine, inosine, and N7-methylguanosine.

[0088] In some embodiments, the siRNA molecules are conjugated to lipids. Lipids can be conjugated to the 5′ or 3′ termini of siRNA to improve their in vivo bioavailability by allowing them to associate with serum lipoproteins. Representative lipids include, but are not limited to, cholesterol and vitamin E, and fatty acids, such as palmitate and tocopherol.

[0089] In some embodiments, a representative siRNA has the following formula: Sense: mN*mN*/i2FN/mN/i2FN/mN/i2FN/mN/i2FN/mN/i2FN/mN/i2FN/mN/i2FN/mN/i2FN/*mN*/32FN/Antisense: /52FN/*/i2FN/*mN/i2FN/mN/i2FN/mN/i2FN/mN/i2FN/mN/i2FN/mN/i2FN/mN/i2FN/mN/i2FN/mN*N*N

[0090] wherein: “N” is the base; “2F” is a 2′-F modification; “m” is a 2′-O-methyl modification, “I” is an internal base; and “*” is a phosphorothioate backbone linkage.

[0091] The present disclosure also provides vectors comprising any one or more of the inhibitory nucleic acid molecules. In some embodiments, the vectors comprise any one or more of the inhibitory nucleic acid molecules and a heterologous nucleic acid. The vectors can be viral or nonviral vectors capable of transporting a nucleic acid molecule. In some embodiments, the vector is a plasmid or cosmid (such as, for example, a circular double-stranded DNA into which additional DNA segments can be ligated). In some embodiments, the vector is a viral vector, wherein additional DNA segments can be ligated into the viral genome. Expression vectors include, but are not limited to, plasmids, cosmids, retroviruses, adenoviruses, adeno-associated viruses (AAV), plant viruses such as cauliflower mosaic virus and tobacco mosaic virus, yeast artificial chromosomes (YACs), Epstein-Barr (EBV)-derived episomes, and other expression vectors known in the art.

[0092] The present disclosure also provides compositions comprising any one or more of the inhibitory nucleic acid molecules. In some embodiments, the composition is a pharmaceutical composition. In some embodiments, the compositions comprise a carrier and/or excipient. Examples of carriers include, but are not limited to, poly(lactic acid) (PLA) microspheres, poly(D,L-lactic-coglycolic-acid) (PLGA) microspheres, liposomes, micelles, inverse micelles, lipid cochleates, and lipid microtubules. A carrier may comprise a buffered salt solution such as PBS, HBSS, etc.

[0093] In some embodiments, the LY75 inhibitor, the CD164 inhibitor, or the PARP1 inhibitor inhibitor comprises a nuclease agent that induces one or more nicks or double-strand breaks at a recognition sequence(s) or a DNA-binding protein that binds to a recognition sequence within an LY75, a CD164, or a PARP1 genomic nucleic acid molecule. The recognition sequence can be located within a coding region of the LY75 gene, the CD164 gene, or the PARP1 gene, or within regulatory regions that influence the expression of the gene. A recognition sequence of the DNA-binding protein or nuclease agent can be located in an intron, an exon, a promoter, an enhancer, a regulatory region, or any non-protein coding region. The recognition sequence can include or be proximate to the start codon of the LY75 gene, the CD164 gene, or the PARP1 gene. For example, the recognition sequence can be located about 10, about 20, about 30, about 40, about 50, about 100, about 200, about 300, about 400, about 500, or about 1,000 nucleotides from the start codon. As another example, two or more nuclease agents can be used, each targeting a nuclease recognition sequence including or proximate to the start codon. As another example, two nuclease agents can be used, one targeting a nuclease recognition sequence including or proximate to the start codon, and one targeting a nuclease recognition sequence including or proximate to the stop codon, wherein cleavage by the nuclease agents can result in deletion of the coding region between the two nuclease recognition sequences. Any nuclease agent that induces a nick or double-strand break into a desired recognition sequence can be used in the methods and compositions disclosed herein. Any DNA-binding protein that binds to a desired recognition sequence can be used in the methods and compositions disclosed herein.

[0094] Suitable nuclease agents and DNA-binding proteins for use herein include, but are not limited to, zinc finger protein or zinc finger nuclease (ZFN) pair, Transcription Activator-Like Effector (TALE) protein or Transcription Activator-Like Effector Nuclease (TALEN), or Clustered Regularly Interspersed Short Palindromic Repeats (CRISPR)/CRISPR-associated (Cas) systems. The length of the recognition sequence can vary, and includes, for example, recognition sequences that are about 30-36 bp for a zinc finger protein or ZFN pair, about 15-18 by for each ZFN, about 36 by fora TALE protein or TALEN, and about 20 by for a CRISPR/Cas guide RNA.

[0095] In some embodiments, CRISPR/Cas systems can be used to modify LY75, CD164, and/or PARP1 genomic nucleic acid molecule within a cell. The methods and compositions disclosed herein can employ CRISPR-Cas systems by utilizing CRISPR complexes (comprising a guide RNA (gRNA) complexed with a Cas protein) for site-directed cleavage of LY75, CD164, and/or PARP1 nucleic acid molecules.

[0096] Cas proteins generally comprise at least one RNA recognition or binding domain that can interact with gRNAs. Cas proteins can also comprise nuclease domains (such as, for example, DNase or RNase domains), DNA binding domains, helicase domains, protein-protein interaction domains, dimerization domains, and other domains. Suitable Cas proteins include, for example, a wild type Cas9 protein and a wild type Cpf1 protein (such as, for example, FnCpf1). A Cas protein can have full cleavage activity to create a double-strand break in an LY75, a CD164, or a PARP1 genomic nucleic acid molecule or it can be a nickase that creates a single-strand break in an LY75, a CD164, or a PARP1 genomic nucleic acid molecule. Additional examples of Cas proteins include, but are not limited to, Cas1, Cas1B, Cast, Cas3, Cas4, Cas5, Cas5e (CasD), Cas6, Cas6e, Cas6f, Cas7, Cas8a1, Cas8a2, Cas8b, Cas8c, Cas9 (Csn1 or Csx12), Cas10, Cas10d, CasF, CasG, CasH, Csy1, Csy2, Csy3, Cse1 (CasA), Cse2 (Cas6), Cse3 (CasE), Cse4 (CasC), Csc1, Csc2, Csa5, Csn2, Csm2, Csm3, Csm4, Csm5, Csm6, Cmr1, Cmr3, Cmr4, Cmr5, Cmr6, Csb1, Csb2, Csb3, Csx17, Csx14, Csx10, Csx16, CsaX, Csx3, Csx1, Csx15, Csf1, Csf2, Csf3, Csf4, and Cu1966, and homologs or modified versions thereof. Cas proteins can also be operably linked to heterologous polypeptides as fusion proteins. For example, a Cas protein can be fused to a cleavage domain, an epigenetic modification domain, a transcriptional activation domain, or a transcriptional repressor domain. Cas proteins can be provided in any form. For example, a Cas protein can be provided in the form of a protein, such as a Cas protein complexed with a gRNA. Alternately, a Cas protein can be provided in the form of a nucleic acid molecule encoding the Cas protein, such as an RNA or DNA.

[0097] In some embodiments, targeted genetic modifications of LY75 genomic nucleic acid molecules can be generated by contacting a cell with a Cas protein and one or more gRNAs that hybridize to one or more gRNA recognition sequences within a target genomic locus in the LY75 genomic nucleic acid molecule. For example, an LY75 gRNA recognition sequence can be located within a region of SEQ ID NO:1. The gRNA recognition sequence can include or be proximate to the start codon of an LY75 genomic nucleic acid molecule or the stop codon of an LY75 genomic nucleic acid molecule. For example, the gRNA recognition sequence can be located from about 10, from about 20, from about 30, from about 40, from about 50, from about 100, from about 200, from about 300, from about 400, from about 500, or from about 1,000 nucleotides of the start codon or the stop codon.

[0098] In some embodiments, targeted genetic modifications of CD164 genomic nucleic acid molecules can be generated by contacting a cell with a Cas protein and one or more gRNAs that hybridize to one or more gRNA recognition sequences within a target genomic locus in the CD164 genomic nucleic acid molecule. For example, a CD164 gRNA recognition sequence can be located within a region of SEQ ID NO:55. The gRNA recognition sequence can include or be proximate to the start codon of a CD164 genomic nucleic acid molecule or the stop codon of a CD164 genomic nucleic acid molecule. For example, the gRNA recognition sequence can be located from about 10, from about 20, from about 30, from about 40, from about 50, from about 100, from about 200, from about 300, from about 400, from about 500, or from about 1,000 nucleotides of the start codon or the stop codon.

[0099] In some embodiments, targeted genetic modifications of PARP1 genomic nucleic acid molecules can be generated by contacting a cell with a Cas protein and one or more gRNAs that hybridize to one or more gRNA recognition sequences within a target genomic locus in the PARP1 genomic nucleic acid molecule. For example, a PARP1 gRNA recognition sequence can be located within a region of SEQ ID NO:113. The gRNA recognition sequence can include or be proximate to the start codon of a PARP1 genomic nucleic acid molecule or the stop codon of a PARP1 genomic nucleic acid molecule. For example, the gRNA recognition sequence can be located from about 10, from about 20, from about 30, from about 40, from about 50, from about 100, from about 200, from about 300, from about 400, from about 500, or from about 1,000 nucleotides of the start codon or the stop codon.

[0100] The gRNA recognition sequences within a target genomic locus in an LY75, a CD164, or a PARP1 genomic nucleic acid molecule are located near a Protospacer Adjacent Motif (PAM) sequence, which is a 2-6 base pair DNA sequence immediately following the DNA sequence targeted by the Cas9 nuclease. The canonical PAM is the sequence 5′-NGG-3′ where “N” is any nucleobase followed by two guanine (“G”) nucleobases. gRNAs can transport Cas9 to anywhere in the genome for gene editing, but no editing can occur at any site other than one at which Cas9 recognizes PAM. In addition, 5′-NGA-3′ can be a highly efficient non-canonical PAM for human cells. Generally, the PAM is about 2-6 nucleotides downstream of the DNA sequence targeted by the gRNA. The PAM can flank the gRNA recognition sequence. In some embodiments, the gRNA recognition sequence can be flanked on the 3′ end by the PAM. In some embodiments, the gRNA recognition sequence can be flanked on the 5′ end by the PAM. For example, the cleavage site of Cas proteins can be about 1 to about 10, about 2 to about 5 base pairs, or three base pairs upstream or downstream of the PAM sequence. In some embodiments (such as when Cas9 from S. pyogenes or a closely related Cas9 is used), the PAM sequence of the non-complementary strand can be 5′-NGG-3′, where N is any DNA nucleotide and is immediately 3′ of the gRNA recognition sequence of the non-complementary strand of the target DNA. As such, the PAM sequence of the complementary strand would be 5′-CCN-3′, where N is any DNA nucleotide and is immediately 5′ of the gRNA recognition sequence of the complementary strand of the target DNA.

[0101] A gRNA is an RNA molecule that binds to a Cas protein and targets the Cas protein to a specific location within an LY75, a CD164, or a PARP1 genomic nucleic acid molecule. An exemplary gRNA is a gRNA effective to direct a Cas enzyme to bind to or cleave an LY75, a CD164, or a PARP1 genomic nucleic acid molecule, wherein the gRNA comprises a DNA-targeting segment that hybridizes to a gRNA recognition sequence within the LY75, CD164, or PARP1 genomic nucleic acid molecule. Exemplary gRNAs comprise a DNA-targeting segment that hybridizes to a gRNA recognition sequence present within an LY75, a CD164, or a PARP1 genomic nucleic acid molecule that includes or is proximate to the start codon or the stop codon. For example, a gRNA can be selected such that it hybridizes to a gRNA recognition sequence that is located from about 5, from about 10, from about 15, from about 20, from about 25, from about 30, from about 35, from about 40, from about 45, from about 50, from about 100, from about 200, from about 300, from about 400, from about 500, or from about 1,000 nucleotides of the start codon or located from about 5, from about 10, from about 15, from about 20, from about 25, from about 30, from about 35, from about 40, from about 45, from about 50, from about 100, from about 200, from about 300, from about 400, from about 500, or from about 1,000 nucleotides of the stop codon. Suitable gRNAs can comprise from about 17 to about 25 nucleotides, from about 17 to about 23 nucleotides, from about 18 to about 22 nucleotides, or from about 19 to about 21 nucleotides. In some embodiments, the gRNAs can comprise 20 nucleotides.

[0102] Examples of suitable gRNA recognition sequences located within the human LY75 reference gene are set forth in Table 1 as SEQ ID NOs:152-171.

TABLE 1
Guide RNA Recognition Sequences Near LY75

| Strand | gRNA Recognition Sequence | SEQ ID NO: |
|---|---|---|
| - | GGTGGATAAGAATTAGCGAG | 152 |
| - | GTGGAAAGTCCAATCATGTG | 153 |
| - | TATGAATATGACCGAAAGTG | 154 |
| - | GAGTATAACTGGGCAACTGT | 155 |
| - | TGTGTAGTATTAGACACTGA | 156 |
| - | TGTGAGCACCACTCTCTGTA | 157 |
| + | GAATAGTAGCAAATAGCACC | 158 |
| - | GAAACCATTAAATAATACAG | 159 |
| + | GGTTGAGTATTAGGGCACAG | 160 |
| - | GTGTTGAGCCAGATTGAACA | 161 |
| - | AATCACCGTTTACTGGGACG | 162 |
| - | ACACCAGACTGGTACAATCC | 163 |
| + | ACAGGGGTCATCAGGCTTAG | 164 |
| - | GCTATACTCTGCTAGAGGCT | 165 |
| + | CAGGTCCCATCAATTAAGAA | 166 |
| - | AATCAGCTATACTCTGCTAG | 167 |
| + | CAGCTGGAGCCACCTATAGT | 168 |
| + | TTCACAGATGAAGGGCAACT | 169 |
| + | GCCAGGATCCTTGTAAATCT | 170 |
| + | CTCACATTTCCACCACAGCA | 171 |

[0103] Examples of suitable gRNA recognition sequences located within the human CD164 reference gene are set forth in Table 2 as SEQ ID NOs:172-191.

TABLE 2
Guide RNA Recognition Sequences NearCD164

| Strand | gRNA Recognition Sequence | SEQ ID NO: |
|---|---|---|
| + | CTGGGTCGTGTTCTTGTCCG | 172 |
| - | AACTCCCCAGAAACCTGTGA | 173 |
| + | CACCGGCGCCGAGGTTACGT | 174 |
| - | ACAGTTAGTGATTGTCAAGT | 175 |
| - | GCCCATCTCCAACGTAACCT | 176 |
| - | CAGTTAGTGATTGTCAAGTG | 177 |
| + | ACCAGCGGGAGGGACGTCAC | 178 |
| + | GGTGCCGGAGTGGTGACCAG | 179 |
| - | CTCCAACGTAACCTCGGCGC | 180 |
| - | GTGCCAACAGCCAATTCTAC | 181 |
| - | CCTCCCGCTGGTCACCACTC | 182 |
| + | TCGACCTTCACAGGTTTCTG | 183 |
| - | AACAGTTAGTGATTGTCAAG | 184 |
| + | GCCGAGGTTACGTTGGAGAT | 185 |
| + | GCAGCTGTTTCGACCTTCAC | 186 |
| + | GAGGGACGTCACCGGCGCCG | 187 |
| + | AGTCGTCACGTTCGGGTGCT | 188 |
| + | AACAACGCTAACATTAAAAC | 189 |
| + | GCAGAGCACGCCCAGGCAGG | 190 |
| + | TTTACATTCTATCCAAAAGC | 191 |

[0104] Examples of suitable gRNA recognition sequences located within the human PARP1 reference gene are set forth in Table 3 as SEQ ID NOs:192-211.

TABLE 3
Guide RNA Recognition Sequences Near PARP

| Strand | gRNA Recognition Sequence | SEQ ID NO: |
|---|---|---|
| + | TACCGATCACCGTACCCACA | 192 |
| - | AACTCGGGGGGAAGTTGACG | 193 |
| - | CGATGCCTATTACTGCACTG | 194 |
| - | AGCTAGGCATGATTGACCGC | 195 |
| + | TGGCCATAGTCAATCTCCAG | 196 |
| - | AATTATATGAAGAAAAAACC | 197 |
| - | ATCTTGGACCGAGTAGCTGA | 198 |
| - | GAAGGAGTGGGTAACCCCAA | 199 |
| + | GGCCATAGTCAATCTCCAGG | 200 |
| + | CTGGCCATAGTCAATCTCCA | 201 |
| - | GGAACAGATGCCGTCCAAGG | 202 |
| - | GACACAGACACCCAACCGGA | 203 |
| + | GGAAGTCCTCAGACACAACT | 204 |
| - | GGCCATGATTGAGAAACTCG | 205 |
| - | TCCAACAGAAGTACGTGCAA | 206 |
| - | TGGCCCCAAGAGGGAAGTCA | 207 |
| - | CATCCGGCACCCTGACGTTG | 208 |
| - | CCCAGAAACCAGCGCCTCCG | 209 |
| - | AAAGAGAAAAGGCGATGAGG | 210 |
| - | CCTGGAGATTGACTATGGCC | 211 |

[0105] The Cas protein and the gRNA form a complex, and the Cas protein cleaves the target LY75, CD164, or PARP1 genomic nucleic acid molecule. The Cas protein can cleave the nucleic acid molecule at a site within or outside of the nucleic acid sequence present in the target LY75, CD164, or PARP1 genomic nucleic acid molecule to which the DNA-targeting segment of a gRNA will bind. For example, formation of a CRISPR complex (comprising a gRNA hybridized to a gRNA recognition sequence and complexed with a Cas protein) can result in cleavage of one or both strands in or near (such as, for example, within 1, 2, 3, 4, 5, 6, 7, 8, 9, 10, 20, 50, or more base pairs from) the nucleic acid sequence present in the LY75, CD164, or PARP1 genomic nucleic acid molecule to which a DNA-targeting segment of a gRNA will bind.

[0106] Such methods can result, for example, in an LY75 genomic nucleic acid molecule in which a region of SEQ ID NO:1 is disrupted, the start codon is disrupted, the stop codon is disrupted, or the coding sequence is disrupted or deleted. Optionally, the cell can be further contacted with one or more additional gRNAs that hybridize to additional gRNA recognition sequences within the target genomic locus in the LY75 genomic nucleic acid molecule. By contacting the cell with one or more additional gRNAs (such as, for example, a second gRNA that hybridizes to a second gRNA recognition sequence), cleavage by the Cas protein can create two or more double-strand breaks or two or more single-strand breaks. The CD164 and the PARP1 genomic DNAs can be similarly targeted.

[0107] In some embodiments, the methods of prevention and/or reduction further comprise detecting the presence or absence of an LY75 variant nucleic acid molecule in a biological sample from the subject. In some embodiments, the methods of prevention and/or reduction further comprise detecting the presence or absence of a CD164 variant nucleic acid molecule in a biological sample from the subject. In some embodiments, the methods of prevention and/or reduction further comprise detecting the presence or absence of a PARP1 variant nucleic acid molecule in a biological sample from the subject.

[0108] The present disclosure also provides methods of treating a subject with a therapeutic agent that treats or inhibits CHIP, wherein the subject is at risk of developing CHIP or a CHIP-related disorder. In some embodiments, the methods comprise determining whether the subject has an LY75 variant nucleic acid molecule by obtaining or having obtained a biological sample from the subject, and performing or having performed a sequence analysis on the biological sample to determine if the subject has a genotype comprising an LY75 variant nucleic acid molecule. In some embodiments, the methods further comprise administering or continuing to administer the therapeutic agent that prevents or reduces development of CHIP in a standard dosage amount to a subject that is LY75, and/or administering an LY75 inhibitor, to the subject. In some embodiments, the methods further comprise administering or continuing to administer the therapeutic agent that prevents or reduces development of CHIP in an amount that is the same as or less than a standard dosage amount to a subject that is heterozygous for the LY75 variant nucleic acid molecule, and/or administering an LY75 inhibitor. In some embodiments, the methods further comprise administering or continuing to administer the therapeutic agent that prevents or reduces development of CHIP in an amount that is the same as or less than a standard dosage amount to a subject that is heterozygous for the LY75 variant nucleic acid molecule, and/or administering an LY75 inhibitor to the subject.

[0109] The present disclosure also provides methods of treating a subject with a therapeutic agent that treats or inhibits CHIP, wherein the subject is at risk of developing CHIP or a CHIP-related disorder. In some embodiments, the methods comprise determining whether the subject has a CD164 variant nucleic acid molecule by obtaining or having obtained a biological sample from the subject, and performing or having performed a sequence analysis on the biological sample to determine if the subject has a genotype comprising a CD164 variant nucleic acid molecule. In some embodiments, the methods further comprise administering or continuing to administer the therapeutic agent that prevents or reduces development of CHIP in a standard dosage amount to a subject that is CD164, and/or administering a CD164 inhibitor, to the subject. In some embodiments, the methods further comprise administering or continuing to administer the therapeutic agent that prevents or reduces development of CHIP in an amount that is the same as or less than a standard dosage amount to a subject that is heterozygous for the CD164 variant nucleic acid molecule, and/or administering a CD164 inhibitor. In some embodiments, the methods further comprise administering or continuing to administer the therapeutic agent that prevents or reduces development of CHIP in an amount that is the same as or less than a standard dosage amount to a subject that is heterozygous for the CD164 variant nucleic acid molecule, and/or administering a CD164 inhibitor to the subject.

[0110] The present disclosure also provides methods of treating a subject with a therapeutic agent that treats or inhibits CHIP, wherein the subject is at risk of developing CHIP or a CHIP-related disorder. In some embodiments, the methods comprise determining whether the subject has a PARP1 variant nucleic acid molecule by obtaining or having obtained a biological sample from the subject, and performing or having performed a sequence analysis on the biological sample to determine if the subject has a genotype comprising a PARP1 variant nucleic acid molecule. In some embodiments, the methods further comprise administering or continuing to administer the therapeutic agent that prevents or reduces development of CHIP in a standard dosage amount to a subject that is PARP1, and/or administering a PARP1 inhibitor, to the subject. In some embodiments, the methods further comprise administering or continuing to administer the therapeutic agent that prevents or reduces development of CHIP in an amount that is the same as or less than a standard dosage amount to a subject that is heterozygous for the PARP1 variant nucleic acid molecule, and/or administering a PARP1 inhibitor. In some embodiments, the methods further comprise administering or continuing to administer the therapeutic agent that prevents or reduces development of CHIP in an amount that is the same as or less than a standard dosage amount to a subject that is heterozygous for the PARP1 variant nucleic acid molecule, and/or administering a PARP1 inhibitor to the subject.

[0111] In some embodiments, the methods further comprise administering or continuing to administer the therapeutic agent that prevents or reduces development of CHIP in an amount that is the same as or less than a standard dosage amount to a subject that is homozygous for an LY75 variant nucleic acid molecule. The presence of a genotype having an LY75 variant nucleic acid molecule indicates the subject has a decreased risk of developing CHIP or a CHIP-related disorder. In some embodiments, the subject is LY75 reference. In some embodiments, the subject is heterozygous for an LY75 variant nucleic acid molecule.

[0112] In some embodiments, the methods further comprise administering or continuing to administer the therapeutic agent that prevents or reduces development of CHIP in an amount that is the same as or less than a standard dosage amount to a subject that is homozygous for a CD164 variant nucleic acid molecule. The presence of a genotype having a CD164 variant nucleic acid molecule indicates the subject has a decreased risk of developing CHIP or a CHIP-related disorder. In some embodiments, the subject is CD164 reference. In some embodiments, the subject is heterozygous for a CD164 variant nucleic acid molecule.

[0113] In some embodiments, the methods further comprise administering or continuing to administer the therapeutic agent that prevents or reduces development of CHIP in an amount that is the same as or less than a standard dosage amount to a subject that is homozygous for a PARP1 variant nucleic acid molecule. The presence of a genotype having a PARP1 variant nucleic acid molecule indicates the subject has a decreased risk of developing CHIP or a CHIP-related disorder. In some embodiments, the subject is PARP1 reference. In some embodiments, the subject is heterozygous for a PARP1 variant nucleic acid molecule.

[0114] For subjects that are genotyped or determined to be either LY75 reference or heterozygous for LY75 variant nucleic acid molecule, such subjects can be administered an LY75 inhibitor, as described herein.

[0115] For subjects that are genotyped or determined to be CD164 reference or heterozygous for CD164 variant nucleic acid molecule, such subjects can be administered a CD164 inhibitor, as described herein.

[0116] For subjects that are genotyped or determined to be PARP1 reference or heterozygous for PARP1 variant nucleic acid molecule, such subjects can be administered a PARP1 inhibitor, as described herein.

[0117] For subjects that are genotyped or determined to be either or both LY75 and CD164 reference, or LY75 reference and heterozygous for a CD164 variant nucleic acid molecule, or CD164 reference and heterozygous for an LY75 variant nucleic acid molecule or heterozygous for both an LY75 variant nucleic acid molecule and a CD164 variant nucleic acid molecule, such subjects can be administered an LY75 inhibitor, a CD164 inhibitor, or both, as described herein.

[0118] For subjects that are genotyped or determined to be either or both LY75 and PARP1 reference, or LY75 reference and heterozygous for a PARP1 variant nucleic acid molecule, or PARP1 reference and heterozygous for an LY75 variant nucleic acid molecule or heterozygous for both an LY75 variant nucleic acid molecule and a PARP1 variant nucleic acid molecule, such subjects can be administered an LY75 inhibitor, a PARP1 inhibitor, or both, as described herein.

[0119] For subjects that are genotyped or determined to be either or both CD164 and PARP1 reference, or CD164 reference and heterozygous for a PARP1 variant nucleic acid molecule, or PARP1 reference and heterozygous for a CD164 variant nucleic acid molecule or heterozygous for both a CD164 variant nucleic acid molecule and a PARP1 variant nucleic acid molecule, such subjects can be administered a CD164 inhibitor, a PARP1 inhibitor, or both, as described herein.

[0120] For subjects that are genotyped or determined to be either LY75, CD164, and PARP1 reference; or LY75 reference and heterozygous for both a CD164 variant nucleic acid molecule and a PARP1 variant nucleic acid molecule; or CD164 reference and heterozygous for both an LY75 variant nucleic acid molecule and a PARP1 variant nucleic acid molecule; or PARP1 reference and heterozygous for both an LY75 variant nucleic acid molecule and a CD164 variant nucleic acid molecule; or heterozygous for an LY75 variant nucleic acid molecule, a CD164 variant nucleic acid molecule, and a PARP1 variant nucleic acid molecule; such subjects can be administered an LY75 inhibitor, a CD164 inhibitor, a PARP1 inhibitor or any combination thereof, as described herein.

[0121] Detecting the presence or absence of one or more LY75, CD164, or PARP1 variant nucleic acid molecules in a biological sample from a subject and/or determining whether a subject has one or more LY75, CD164, or PARP1 variant nucleic acid molecules can be carried out by any of the methods described herein. In some embodiments, these methods can be carried out in vitro. In some embodiments, these methods can be carried out in situ. In some embodiments, these methods can be carried out in vivo. In any of these embodiments, the nucleic acid molecule can be present within a cell obtained from the subject.

[0122] In some embodiments, when the subject is LY75 reference, the subject is administered a therapeutic agent that prevents or reduces development of CHIP in a standard dosage amount. In some embodiments, when the subject is heterozygous LY75 variant nucleic acid molecule, the subject is administered a therapeutic agent that prevents or reduces development of CHIP in a dosage amount that is the same as or less than a standard dosage amount.

[0123] In some embodiments, when the subject is CD164 reference, the subject is administered a therapeutic agent that prevents or reduces development of CHIP in a standard dosage amount. In some embodiments, when the subject is heterozygous for CD164 variant nucleic acid molecule, the subject is administered a therapeutic agent that prevents or reduces development of CHIP in a dosage amount that is the same as or less than a standard dosage amount.

[0124] In some embodiments, when the subject is PARP1 reference, the subject is administered a therapeutic agent that prevents or reduces development of CHIP in a standard dosage amount. In some embodiments, when the subject is heterozygous for PARP1 variant nucleic acid molecule, the subject is administered a therapeutic agent that prevents or reduces development of CHIP in a dosage amount that is the same as or less than a standard dosage amount.

[0125] In some embodiments, the prevention and/or reduction methods comprise detecting the presence or absence of an LY75 predicted loss-of-function polypeptide in a biological sample from the subject. In some embodiments, when the subject does not have an LY75 predicted loss-of-function polypeptide, the subject is administered a therapeutic agent that prevents or reduces development of CHIP in a standard dosage amount. In some embodiments, when the subject has an LY75 predicted loss-of-function polypeptide, the subject is administered a therapeutic agent that prevents or reduces CHIP in a dosage amount that is the same as or less than a standard dosage amount.

[0126] In some embodiments, the prevention and/or reduction methods comprise detecting the presence or absence of a CD164 predicted loss-of-function polypeptide in a biological sample from the subject. In some embodiments, when the subject does not have a CD164 predicted loss-of-function polypeptide, the subject is administered a therapeutic agent that prevents or reduces development of CHIP in a standard dosage amount. In some embodiments, when the subject has a CD164 predicted loss-of-function polypeptide, the subject is administered a therapeutic agent that prevents or reduces CHIP in a dosage amount that is the same as or less than a standard dosage amount.

[0127] In some embodiments, the prevention and/or reduction methods comprise detecting the presence or absence of a PARP1 predicted loss-of-function polypeptide in a biological sample from the subject. In some embodiments, when the subject does not have a PARP1 predicted loss-of-function polypeptide, the subject is administered a therapeutic agent that prevents or reduces development of CHIP in a standard dosage amount. In some embodiments, when the subject has a PARP1 predicted loss-of-function polypeptide, the subject is administered a therapeutic agent that prevents or reduces CHIP in a dosage amount that is the same as or less than a standard dosage amount.

[0128] The present disclosure also provides methods of treating a subject with a therapeutic agent that treats or inhibits a hematologic cancer, wherein the subject has CHIP. In some embodiments, the method comprises determining whether the subject has an LY75 variant nucleic acid molecule by obtaining or having obtained a biological sample from the subject, and performing or having performed a sequence analysis on the biological sample to determine if the subject has an LY75 variant nucleic acid molecule. When the subject does not have an LY75 variant nucleic acid molecule, the therapeutic agent that treats or inhibits a hematologic cancer is administered or continued to be administered to the subject in a standard dosage amount, and/or an LY75 inhibitor is administered to the subject. When the subject has an LY75 variant nucleic acid molecule, the therapeutic agent that treats or inhibits hematologic cancer is administered or continued to be administered to the subject in an amount that is the same as or less than a standard dosage amount, and/or an LY75 inhibitor is administered to the subject. The presence of an LY75 variant nucleic acid molecule indicates the subject has a decreased risk of developing hematologic cancer. In some embodiments, the subject has an LY75 variant nucleic acid molecule. In some embodiments, the subject does not have an LY75 variant nucleic acid molecule.

[0129] The present disclosure also provides methods of treating a subject with a therapeutic agent that treats or inhibits a hematologic cancer, wherein the subject has CHIP. In some embodiments, the method comprises determining whether the subject has a CD164 variant nucleic acid molecule by obtaining or having obtained a biological sample from the subject, and performing or having performed a sequence analysis on the biological sample to determine if the subject has a CD164 variant nucleic acid molecule. When the subject does not have a CD164 variant nucleic acid molecule, the therapeutic agent that treats or inhibits a hematologic cancer is administered or continued to be administered to the subject in a standard dosage amount, and/or a CD164 inhibitor is administered to the subject. When the subject has a CD164 variant nucleic acid molecule, the therapeutic agent that treats or inhibits hematologic cancer is administered or continued to be administered to the subject in an amount that is the same as or less than a standard dosage amount, and/or a CD164 inhibitor is administered to the subject. The presence of a CD164 variant nucleic acid molecule indicates the subject has a decreased risk of developing hematologic cancer. In some embodiments, the subject has a CD164 variant nucleic acid molecule. In some embodiments, the subject does not have a CD164 variant nucleic acid molecule.

[0130] The present disclosure also provides methods of treating a subject with a therapeutic agent that treats or inhibits a hematologic cancer, wherein the subject has CHIP. In some embodiments, the method comprises determining whether the subject has a PARP1 variant nucleic acid molecule by obtaining or having obtained a biological sample from the subject, and performing or having performed a sequence analysis on the biological sample to determine if the subject has a PARP1 variant nucleic acid molecule. When the subject does not have a PARP1 variant nucleic acid molecule, the therapeutic agent that treats or inhibits a hematologic cancer is administered or continued to be administered to the subject in a standard dosage amount, and/or a PARP1 inhibitor is administered to the subject. When the subject has a PARP1 variant nucleic acid molecule, the therapeutic agent that treats or inhibits hematologic cancer is administered or continued to be administered to the subject in an amount that is the same as or less than a standard dosage amount, and/or a PARP1 inhibitor is administered to the subject. The presence of a PARP1 variant nucleic acid molecule indicates the subject has a decreased risk of developing hematologic cancer. In some embodiments, the subject has a PARP1 variant nucleic acid molecule. In some embodiments, the subject does not have a PARP1 variant nucleic acid molecule.

[0131] In some embodiments when the subject has both an LY75 variant nucleic acid molecule and a CD164 variant nucleic acid molecule, the therapeutic agent that treats or inhibits hematologic cancer is administered or continued to be administered to the subject in an amount that is the same as or less than a standard dosage amount, and/or an LY75 inhibitor, or a CD164 inhibitor or both is administered to the subject.

[0132] In some embodiments when the subject has both an LY75 variant nucleic acid molecule and a PARP1 variant nucleic acid molecule, the therapeutic agent that treats or inhibits hematologic cancer is administered or continued to be administered to the subject in an amount that is the same as or less than a standard dosage amount, and/or an LY75 inhibitor, or a PARP1 inhibitor, or both is administered to the subject.

[0133] In some embodiments when the subject has both a CD164 variant nucleic acid molecule and a PARP1 variant nucleic acid molecule, the therapeutic agent that treats or inhibits hematologic cancer is administered or continued to be administered to the subject in an amount that is the same as or less than a standard dosage amount, and/or a CD164 inhibitor, or a PARP1 inhibitor, or both is administered to the subject.

[0134] In some embodiments when the subject has an LY75 variant nucleic acid molecule, a CD164 variant nucleic acid molecule, and a PARP1 variant nucleic acid molecule, the therapeutic agent that treats or inhibits hematologic cancer is administered or continued to be administered to the subject in an amount that is the same as or less than a standard dosage amount, and/or an LY75 inhibitor, a CD164 inhibitor, a PARP1 inhibitor, or any combination thereof is administered to the subject.

[0135] The present disclosure also provides methods of treating a subject with a therapeutic agent that treats or inhibits an atherosclerotic cardiovascular disease, wherein the subject has CHIP. In some embodiments, the method comprises determining whether the subject has an LY75 variant nucleic acid molecule by obtaining or having obtained a biological sample from the subject, and performing or having performed a sequence analysis on the biological sample to determine if the subject has an LY75 variant nucleic acid molecule. When the subject does not have an LY75 variant nucleic acid molecule, the therapeutic agent that treats or inhibits an atherosclerotic cardiovascular disease is administered or continued to be administered to the subject in a standard dosage amount, and/or an LY75 inhibitor is administered to the subject. When the subject has an LY75 variant nucleic acid molecule, the therapeutic agent that treats or inhibits atherosclerotic cardiovascular disease is administered or continued to be administered to the subject in an amount that is the same as or less than a standard dosage amount, and/or an LY75 inhibitor is administered to the subject. The presence of an LY75 variant nucleic acid molecule indicates the subject has a decreased risk of developing atherosclerotic cardiovascular disease. In some embodiments, the subject has an LY75 variant nucleic acid molecule. In some embodiments, the subject does not have an LY75 variant nucleic acid molecule.

[0136] The present disclosure also provides methods of treating a subject with a therapeutic agent that treats or inhibits an atherosclerotic cardiovascular disease, wherein the subject has CHIP. In some embodiments, the method comprises determining whether the subject has a CD164 variant nucleic acid molecule by obtaining or having obtained a biological sample from the subject, and performing or having performed a sequence analysis on the biological sample to determine if the subject has a CD164 variant nucleic acid molecule. When the subject does not have a CD164 variant nucleic acid molecule, the therapeutic agent that treats or inhibits an atherosclerotic cardiovascular disease is administered or continued to be administered to the subject in a standard dosage amount, and/or a CD164 inhibitor is administered to the subject. When the subject has a CD164 variant nucleic acid molecule, the therapeutic agent that treats or inhibits atherosclerotic cardiovascular disease is administered or continued to be administered to the subject in an amount that is the same as or less than a standard dosage amount, and/or a CD164 inhibitor is administered to the subject. The presence of a CD164 variant nucleic acid molecule indicates the subject has a decreased risk of developing atherosclerotic cardiovascular disease. In some embodiments, the subject has a CD164 variant nucleic acid molecule. In some embodiments, the subject does not have a CD164 variant nucleic acid molecule.

[0137] The present disclosure also provides methods of treating a subject with a therapeutic agent that treats or inhibits an atherosclerotic cardiovascular disease, wherein the subject has CHIP. In some embodiments, the method comprises determining whether the subject has a PARP1 variant nucleic acid molecule by obtaining or having obtained a biological sample from the subject, and performing or having performed a sequence analysis on the biological sample to determine if the subject has a PARP1 variant nucleic acid molecule. When the subject does not have a PARP1 variant nucleic acid molecule, the therapeutic agent that treats or inhibits an atherosclerotic cardiovascular disease is administered or continued to be administered to the subject in a standard dosage amount, and/or a PARP1 inhibitor is administered to the subject. When the subject has a PARP1 variant nucleic acid molecule, the therapeutic agent that treats or inhibits atherosclerotic cardiovascular disease is administered or continued to be administered to the subject in an amount that is the same as or less than a standard dosage amount, and/or a PARP1 inhibitor is administered to the subject. The presence of a PARP1 variant nucleic acid molecule indicates the subject has a decreased risk of developing atherosclerotic cardiovascular disease. In some embodiments, the subject has a PARP1 variant nucleic acid molecule. In some embodiments, the subject does not have a PARP1 variant nucleic acid molecule.

[0138] In some embodiments when the subject has both an LY75 variant nucleic acid molecule and a CD164 variant nucleic acid molecule, the therapeutic agent that treats or inhibits atherosclerotic cardiovascular disease is administered or continued to be administered to the subject in an amount that is the same as or less than a standard dosage amount, and/or an LY75 inhibitor, or a CD164 inhibitor or both is administered to the subject.

[0139] In some embodiments when the subject has both an LY75 variant nucleic acid molecule and a PARP1 variant nucleic acid molecule, the therapeutic agent that treats or inhibits atherosclerotic cardiovascular disease is administered or continued to be administered to the subject in an amount that is the same as or less than a standard dosage amount, and/or an LY75 inhibitor, or a PARP1 inhibitor, or both is administered to the subject.

[0140] In some embodiments when the subject has both a CD164 variant nucleic acid molecule and a PARP1 variant nucleic acid molecule, the therapeutic agent that treats or inhibits atherosclerotic cardiovascular disease is administered or continued to be administered to the subject in an amount that is the same as or less than a standard dosage amount, and/or a CD164 inhibitor, or a PARP1 inhibitor, or both is administered to the subject.

[0141] In some embodiments when the subject has an LY75 variant nucleic acid molecule, a CD164 variant nucleic acid molecule, and a PARP1 variant nucleic acid molecule, the therapeutic agent that treats or inhibits atherosclerotic cardiovascular disease is administered or continued to be administered to the subject in an amount that is the same as or less than a standard dosage amount, and/or an LY75 inhibitor, a CD164 inhibitor, a PARP1 inhibitor, or any combination thereof is administered to the subject.

[0142] In some embodiments, the subject is heterozygous for an LY75 variant nucleic acid molecule, and the subject is further administered or continued to be administered the therapeutic agent that prevents or reduces development of CHIP in an amount that is the same as or less than a standard dosage amount, and is administered the LY75 inhibitor.

[0143] In some embodiments, the subject is heterozygous for a CD164 variant nucleic acid molecule, and the subject is further administered or continued to be administered the therapeutic agent that prevents or reduces development of CHIP in an amount that is the same as or less than a standard dosage amount, and is administered the CD164 inhibitor.

[0144] In some embodiments, the subject is heterozygous for a PARP1 variant nucleic acid molecule, and the subject is further administered or continued to be administered the therapeutic agent that prevents or reduces development of CHIP in an amount that is the same as or less than a standard dosage amount, and is administered the PARP1 inhibitor.

[0145] In some embodiments, the subject is heterozygous for both an LY75 variant nucleic acid molecule and a CD164 variant nucleic acid molecule, and the subject is further administered or continued to be administered the therapeutic agent that prevents or reduces development of CHIP in an amount that is the same as or less than a standard dosage amount, and is administered an LY75 inhibitor, a CD164 inhibitor, or both, as described herein.

[0146] In some embodiments, the subject is heterozygous for both an LY75 variant nucleic acid molecule and a PARP1 variant nucleic acid molecule, and the subject is further administered or continued to be administered the therapeutic agent that prevents or reduces development of CHIP in an amount that is the same as or less than a standard dosage amount, and is administered an LY75 inhibitor, a PARP1 inhibitor, or both, as described herein.

[0147] In some embodiments, the subject is heterozygous for both a CD164 variant nucleic acid molecule and a PARP1 variant nucleic acid molecule, and the subject is further administered or continued to be administered the therapeutic agent that prevents or reduces development of CHIP in an amount that is the same as or less than a standard dosage amount, and is administered a CD164 inhibitor, a PARP1 inhibitor, or both, as described herein.

[0148] In some embodiments, the subject is heterozygous for an LY75 variant nucleic acid molecule, a CD164 variant nucleic acid molecule, and a PARP1 variant nucleic acid molecule; and the subject is further administered or continued to be administered the therapeutic agent that prevents or reduces development of CHIP in an amount that is the same as or less than a standard dosage amount, and is administered an LY75 inhibitor, a CD164 inhibitor, a PARP1 inhibitor or any combination thereof, as described herein.

[0149] The present disclosure also provides methods of preventing a subject from developing CHIP by administering a therapeutic agent that prevents or reduces development of CHIP. In some embodiments, the method comprises determining whether the subject has an LY75 variant nucleic acid molecule by obtaining or having obtained a biological sample from the subject, and performing or having performed a sequence analysis on the biological sample to determine if the subject has an LY75 variant nucleic acid molecule. When the subject does not have an LY75 variant nucleic acid molecule, the therapeutic agent that prevents or reduces development of CHIP is administered or continued to be administered to the subject in a standard dosage amount, and/or an LY75 inhibitor, is administered to the subject. When the subject has an LY75 variant nucleic acid molecule, the therapeutic agent that prevents or reduces development of CHIP is administered or continued to be administered to the subject in an amount that is the same as or less than a standard dosage amount, and/or an LY75 inhibitor is administered to the subject.

[0150] The present disclosure also provides methods of preventing a subject from developing CHIP by administering a therapeutic agent that prevents or reduces development of CHIP. In some embodiments, the method comprises determining whether the subject has a CD164 variant nucleic acid molecule by obtaining or having obtained a biological sample from the subject, and performing or having performed a sequence analysis on the biological sample to determine if the subject has a CD164 variant nucleic acid molecule. When the subject does not have a CD164 variant nucleic acid molecule, the therapeutic agent that prevents or reduces development of CHIP is administered or continued to be administered to the subject in a standard dosage amount, and/or a CD164 inhibitor, is administered to the subject. When the subject has a CD164 variant nucleic acid molecule, the therapeutic agent that prevents or reduces development of CHIP is administered or continued to be administered to the subject in an amount that is the same as or less than a standard dosage amount, and/or a CD164 inhibitor is administered to the subject.

[0151] The present disclosure also provides methods of preventing a subject from developing CHIP by administering a therapeutic agent that prevents or reduces development of CHIP. In some embodiments, the method comprises determining whether the subject has a PARP1 variant nucleic acid molecule by obtaining or having obtained a biological sample from the subject, and performing or having performed a sequence analysis on the biological sample to determine if the subject has a PARP1 variant nucleic acid molecule. When the subject does not have a PARP1 variant nucleic acid molecule, the therapeutic agent that prevents or reduces development of CHIP is administered or continued to be administered to the subject in a standard dosage amount, and/or a PARP1 inhibitor, is administered to the subject. When the subject has a PARP1 variant nucleic acid molecule, the therapeutic agent that prevents or reduces development of CHIP is administered or continued to be administered to the subject in an amount that is the same as or less than a standard dosage amount, and/or a PARP1 inhibitor is administered to the subject.

[0152] In some embodiments, when the subject has both an LY75 variant nucleic acid molecule and a CD164 variant nucleic acid molecule, the therapeutic agent that treats or inhibits atherosclerotic cardiovascular disease is administered or continued to be administered to the subject in an amount that is the same as or less than a standard dosage amount, and/or an LY75 inhibitor, or a CD164 inhibitor or both is administered to the subject.

[0153] In some embodiments, when the subject has both an LY75 variant nucleic acid molecule and a PARP1 variant nucleic acid molecule, the therapeutic agent that treats or inhibits atherosclerotic cardiovascular disease is administered or continued to be administered to the subject in an amount that is the same as or less than a standard dosage amount, and/or an LY75 inhibitor, or a PARP1 inhibitor, or both is administered to the subject.

[0154] In some embodiments when the subject has both a CD164 variant nucleic acid molecule and a PARP1 variant nucleic acid molecule, the therapeutic agent that treats or inhibits atherosclerotic cardiovascular disease is administered or continued to be administered to the subject in an amount that is the same as or less than a standard dosage amount, and/or a CD164 inhibitor, or a PARP1 inhibitor, or both is administered to the subject.

[0155] In some embodiments when the subject has an LY75 variant nucleic acid molecule, a CD164 variant nucleic acid molecule, and a PARP1 variant nucleic acid molecule, the therapeutic agent that treats or inhibits atherosclerotic cardiovascular disease is administered or continued to be administered to the subject in an amount that is the same as or less than a standard dosage amount, and/or an LY75 inhibitor, a CD164 inhibitor, a PARP1 inhibitor, or any combination thereof is administered to the subject.

[0156] The presence of one or more LY75, CD164, or PARP1 variant nucleic acid molecules indicates the subject has a decreased risk of developing CHIP or a CHIP-related disorder. In some embodiments, the subject has one or more LY75, CD164, or PARP1 variant nucleic acid molecules. In some embodiments, the subject does not have one or more LY75, CD164, or PARP1 variant nucleic acid molecules.

[0157] Detecting the presence or absence of one or more LY75, CD164, or PARP1 variant nucleic acid molecules in a biological sample from a subject and/or determining whether a subject has one or more LY75, CD164, or PARP1 variant nucleic acid molecules can be carried out by any of the methods described herein. In some embodiments, these methods can be carried out in vitro. In some embodiments, these methods can be carried out in situ.

[0158] In some embodiments, these methods can be carried out in vivo. In any of these embodiments, the polypeptide can be present within a cell obtained from the subject.

[0159] In any of the embodiments described herein for nucleic acid molecules, similar methods are also included for polypeptides.

[0160] In some embodiments, the LY75 inhibitor is a small molecule. In some embodiments, the LY75 inhibitor is an inhibitory nucleic acid molecule.

[0161] In some embodiments, the CD164 inhibitor is a small molecule. In some embodiments, the CD164 inhibitor is atorvastatin. In some embodiments, the CD164 inhibitor is an inhibitory nucleic acid molecule.

[0162] In some embodiments, the PARP1 inhibitor is a small molecule. In some embodiments, the PARP1 inhibitor is rucaparib, olaparib, veliparib ABT-888, veliparib, INO-1001, MK4827, CEP-9722, BMN-673, iniparib, AG-14361, NMS-P118, BYK204165, 4-hydroxyquinazoline, pamiparib, E7449, A-966492, niraparib, mortaparib, or ME0238. In some embodiments, the PARP1 inhibitor is an inhibitory nucleic acid molecule.

[0163] Examples of therapeutic agents that treat or inhibit myeloid neoplasia include, but are not limited to, arsenic trioxide, azacitidine, cerubidine (daunorubicin hydrochloride), cyclophosphamide, cytarabine, daunorubicin hydrochloride, daunorubicin hydrochloride and cytarabine liposome, daurismo (glasdegib maleate), dexamethasone, doxorubicin hydrochloride, enasidenib mesylate, gemtuzumab ozogamicin, gilteritinib fumarate, glasdegib maleate, idamycin pfs (idarubicin hydrochloride), idarubicin hydrochloride, idhifa (enasidenib mesylate), ivosidenib, midostaurin, mitoxantrone hydrochloride, mylotarg (gemtuzumab ozogamicin), onureg (azacitidine), prednisone, rubidomycin (daunorubicin hydrochloride), rydapt (midostaurin), tabloid (thioguanine), thioguanine, tibsovo (ivosidenib), trisenox (arsenic trioxide), venclexta (venetoclax), venetoclax, vincristine sulfate, vyxeos (daunorubicin hydrochloride and cytarabine liposome), and xospata (gilteritinib fumarate).

[0164] Examples of therapeutic agents that treat or inhibit lymphoid neoplasia include, but are not limited to, acalabrutinib, alemtuzumab, arzerra (ofatumumab), bendamustine hydrochloride, bendeka (bendamustine hydrochloride), calquence (acalabrutinib), campath (alemtuzumab), chlorambucil, copiktra (duvelisib), cyclophosphamide, dexamethasone, duvelisib, fludarabine phosphate, gazyva (obinutuzumab), ibrutinib, idelalisib, imbruvica (ibrutinib), leukeran (chlorambucil), obinutuzumab, ofatumumab, prednisone, rituxan (rituximab), rituxan hycela (rituximab and hyaluronidase human), rituximab, rituximab and hyaluronidase human, treanda (bendamustine hydrochloride), truxima (rituximab), venclexta (venetoclax), venetoclax, and zydelig (idelalisib).

[0165] Examples of therapeutic agents that treat or inhibit coronary heart disease include, but are not limited to, angiotensin converting enzyme (ACE) inhibitors (such as benazepril, captopril, enalapril, fosinopril, lisinopril, moexipril, perindopril, quinapril, ramipril, or trandolapril); beta blockers (such as acebutolol, atenolol, betaxolol, bisoprolol, bisoprolol/hydrochlorothiazide, metoprolol tartrate, metoprolol succinate, nadolol, pindolol, propranolol, solotol, or timolol); calcium chamel blockers (such as amlodipine, diltiazem, felodipine, isradipine, nicardipine, nifedipine, nisoldipine, orverapamil); metformin; and nitrates (such as nitroglycerin).

[0166] Examples of therapeutic agents that treat or inhibit myocardial infarction include, but are not limited to, antiplatelet blood thimers (such as aspirin, clopidogrel, prasugrel, ticagrelor, dipyridamole, or integrilin); angiotensin converting enzyme (ACE) inhibitors (such as benazepril, captopril, enalapril, fosinopril, lisinopril, moexipril, perindopril, quinapril, ramipril, or trandolapril); beta blockers (such as acebutolol, atenolol, betaxolol, bisoprolol, bisoprolol/hydrochlorothiazide, metoprolol tartrate, metoprolol succinate, nadolol, pindolol, propranolol, solotol, or timolol); vasodilators (such as hydralazine or minoxidil); or trombolytics (such as streptokinase, reteplase, alteplase, urokinase, or tenecteplase).

[0167] Examples of therapeutic agents that treat or inhibit severe calcified aortic valve stenosis include, but are not limited to, angiotensin converting enzyme (ACE) inhibitors (such as benazepril, captopril, enalapril, fosinopril, lisinopril, moexipril, perindopril, quinapril, ramipril, or trandolapril); beta blockers (such as acebutolol, atenolol, betaxolol, bisoprolol, bisoprolol/hydrochlorothiazide, metoprolol tartrate, metoprolol succinate, nadolol, pindolol, propranolol, solotol, or timolol); diuretics (such as chlorothiazide, chlorthalidone, hydrochlorothiazide, indapamide, metolazone, bumetanide, ethacrynic acid, furosemide, torsemide, amiloride, eplerenone, spironolactone, or triamterene); and antiarrhythmic drugs (such as amiodarone, flecainide, ibutilide, lidocaine, procainamide, propafenone, quinidine, or tocainide).

[0168] In some embodiments, the dose of the therapeutic agents that prevent or reduce CHIP can be decreased by about 10%, by about 20%, by about 30%, by about 40%, by about 50%, by about 60%, by about 70%, by about 80%, or by about 90% for subjects that are heterozygous for an LY75 variant nucleic acid molecule, heterozygous for a CD164 variant nucleic acid molecule, or heterozygous for a PARP1 variant nucleic acid molecule (i.e., a less than the standard dosage amount) compared to subjects that are LY75, CD164, and PARP1 reference (who may receive a standard dosage amount). In some embodiments, the dose of the therapeutic agents that prevent or reduce CHIP can be decreased by about 10%, by about 20%, by about 30%, by about 40%, or by about 50%. In addition, the subjects that are heterozygous for an LY75 variant nucleic acid molecule, or heterozygous for a CD164 variant nucleic acid molecule, or heterozygous for a PARP1 variant nucleic acid molecule can be administered less frequently compared to subjects that are LY75, CD164, and PARP1 reference.

[0169] In some embodiments, the dose of the therapeutic agents that prevent or reduce CHIP can be decreased by about 10%, by about 20%, by about 30%, by about 40%, by about 50%, for subjects that are homozygous for an LY75 variant nucleic acid molecule compared to subjects that are heterozygous for an LY75 variant nucleic acid molecule. In some embodiments, the dose of the therapeutic agents that prevent or reduce CHIP can be decreased by about 10%, by about 20%, by about 30%, by about 40%, or by about 50%. In addition, the dose of therapeutic agents that prevent or reduce CHIP in subjects that are homozygous for an LY75 variant nucleic acid molecule can be administered less frequently compared to subjects that are heterozygous for an LY75 variant nucleic acid molecule.

[0170] In some embodiments, the dose of the therapeutic agents that prevent or reduce CHIP can be decreased by about 10%, by about 20%, by about 30%, by about 40%, by about 50%, for subjects that are homozygous for a CD164 variant nucleic acid molecule compared to subjects that are heterozygous for a CD164 variant nucleic acid molecule. In some embodiments, the dose of the therapeutic agents that prevent or reduce CHIP can be decreased by about 10%, by about 20%, by about 30%, by about 40%, or by about 50%. In addition, the dose of therapeutic agents that prevent or reduce CHIP in subjects that are homozygous for a CD164 variant nucleic acid molecule can be administered less frequently compared to subjects that are heterozygous for a CD164 variant nucleic acid molecule.

[0171] In some embodiments, the dose of the therapeutic agents that prevent or reduce CHIP can be decreased by about 10%, by about 20%, by about 30%, by about 40%, by about 50%, for subjects that are homozygous for a PARP1 variant nucleic acid molecule compared to subjects that are heterozygous for a PARP1 variant nucleic acid molecule. In some embodiments, the dose of the therapeutic agents that prevent or reduce CHIP can be decreased by about 10%, by about 20%, by about 30%, by about 40%, or by about 50%. In addition, the dose of therapeutic agents that prevent or reduce CHIP in subjects that are homozygous for a PARP1 variant nucleic acid molecule can be administered less frequently compared to subjects that are heterozygous for a PARP1 variant nucleic acid molecule.

[0172] Administration of the therapeutic agents that prevent CHIP and/or LY75 inhibitors, or CD164 inhibitors, PARP1 inhibitors, or any combination thereof can be repeated, for example, after one day, two days, three days, five days, one week, two weeks, three weeks, one month, five weeks, six weeks, seven weeks, eight weeks, two months, or three months. The repeated administration can be at the same dose or at a different dose. The administration can be repeated once, twice, three times, four times, five times, six times, seven times, eight times, nine times, ten times, or more. For example, according to certain dosage regimens a subject can receive therapy for a prolonged period of time such as, for example, 6 months, 1 year, or more.

[0173] Administration of the therapeutic agents that prevent CHIP and/or LY75 inhibitors, or CD164 inhibitors, PARP1 inhibitors, or any combination thereof can occur by any suitable route including, but not limited to, parenteral, intravenous, oral, subcutaneous, intra-arterial, intracranial, intrathecal, intraperitoneal, topical, intranasal, or intramuscular. Pharmaceutical compositions for administration are desirably sterile and substantially isotonic and manufactured under GMP conditions. Pharmaceutical compositions can be provided in unit dosage form (i.e., the dosage for a single administration). Pharmaceutical compositions can be formulated using one or more physiologically and pharmaceutically acceptable carriers, diluents, excipients or auxiliaries. The formulation depends on the route of administration chosen. The term “pharmaceutically acceptable” means that the carrier, diluent, excipient, or auxiliary is compatible with the other ingredients of the formulation and not substantially deleterious to the recipient thereof.

[0174] The terms “treat”, “treating”, and “treatment” and “prevent”, “preventing”, and “prevention” as used herein, refer to eliciting the desired biological response, such as a therapeutic and prophylactic effect, respectively. In some embodiments, a therapeutic effect comprises one or more of a decrease/reduction in CHIP, a decrease/reduction in the severity of CHIP (such as, for example, a reduction or inhibition of development of CHIP), a decrease/reduction in symptoms and CHIP-related effects, delaying the onset of symptoms and CHIP-related effects, reducing the severity of symptoms of c CHIP-related effects, reducing the number of symptoms and CHIP-related effects, reducing the latency of symptoms and CHIP-related effects, an amelioration of symptoms and CHIP-related effects, reducing secondary symptoms, reducing secondary infections, preventing relapse to CHIP, decreasing the number or frequency of relapse episodes, increasing latency between symptomatic episodes, increasing time to sustained progression, speeding recovery, or increasing efficacy of or decreasing resistance to alternative therapeutics, and/or an increased survival time of the affected host animal, following administration of the agent or composition comprising the agent. A prophylactic effect may comprise a complete or partial avoidance/inhibition or a delay of CHIP development/progression (such as, for example, a complete or partial avoidance/inhibition or a delay), and an increased survival time of the affected host animal, following administration of a therapeutic protocol. Treatment of CHIP encompasses the treatment of a subject already diagnosed as having any form of CHIP at any clinical stage or manifestation, the delay of the onset or evolution or aggravation or deterioration of the symptoms or signs of CHIP, and/or preventing and/or reducing the severity of CHIP.

[0175] In any of the embodiments described herein, for subjects that carry a loss-of-function variant for TET2 (such as, for example, due to the presence of an INDEL; a TET2 somatic mutation deficiency), the methods of treatment and prevention can exclude treatment with a PARP1 inhibitor. Such subjects can be otherwise treated as described herein.

[0176] The present disclosure also provides methods of identifying a subject having an increased risk of developing CHIP. In some embodiments, the method comprises determining or having determined in a biological sample obtained from the subject the presence or absence of an LY75 variant nucleic acid molecule, a CD164 variant nucleic acid molecule, and/or a PARP1 variant nucleic acid molecule. When the subject lacks an LY75, a CD164, and/or a PARP1 variant nucleic acid molecule (i.e., the subject is genotypically categorized as LY75, CD164, and/or PARP1 reference), then the subject has an increased risk of developing CHIP. When the subject has one or more of an LY75 variant nucleic acid molecule, a CD164 variant nucleic acid molecule, and/or a PARP1 variant nucleic acid molecule (i.e., the subject is heterozygous or homozygous for one or more of an LY75, a CD164, or a PARP1 variant nucleic acid molecule), then the subject has a decreased risk of developing CHIP.

[0177] Having a single copy of an LY75 variant nucleic acid molecule is more protective of a subject from developing CHIP than having no copies of an LY75 variant nucleic acid molecule. Having a single copy of a CD164 variant nucleic acid molecule is more protective of a subject from developing CHIP than having no copies of a CD164 variant nucleic acid molecule. Having a single copy of a PARP1 variant nucleic acid molecule is more protective of a subject from developing CHIP than having no copies of a PARP1 variant nucleic acid molecule.

[0178] Without intending to be limited to any particular theory or mechanism of action, it is believed that a single copy of an LY75 variant nucleic acid molecule, a CD164, variant nucleic acid molecule, or a PARP1 variant nucleic acid molecule (i.e., heterozygous for one or more of an LY75, a CD164, or a PARP1 variant nucleic acid molecule) is protective of a subject from developing CHIP and CHIP-related disorders, and it is also believed that having two copies of an LY75 variant nucleic acid molecule, a CD164 variant nucleic acid molecule, or a PARP1 variant nucleic acid molecule (i.e., homozygous for one or more orf an LY75, a CD164, or a PARP1 variant nucleic acid molecule) may be more protective of a subject from developing CHIP and CHIP-related disorders, relative to a subject with a single copy of a corresponding LY75, CD164, or PARP1 variant nucleic acid molecule.

[0179] Thus, in some embodiments, a single copy of of an LY75 variant nucleic acid molecule, a CD164 variant nucleic acid molecule, or a PARP1 variant nucleic acid molecule may not be completely protective, but instead, may be partially or incompletely protective of a subject from developing CHIP and CHIP-related disorders. While not desiring to be bound by any particular theory, there may be additional factors or molecules involved in the development of CHIP and CHIP-related disorders that are still present in a subject having a single copy of one or more of an LY75, a CD164, or a PARP1 variant nucleic acid molecule, thus resulting in less than complete protection from the development of CHIP and CHIP-related disorders.

[0180] Determining whether a subject has one or more of an LY75, a CD164, or a PARP1 variant nucleic acid molecule can be carried out by any of the methods described herein. In some embodiments, these methods can be carried out in vitro. In some embodiments, these methods can be carried out in situ. In some embodiments, these methods can be carried out in vivo. In any of these embodiments, the nucleic acid molecule can be present within a cell obtained from the subject.

[0181] In some embodiments, when a subject is identified as having an increased risk of developing CHIP, the subject is administered a therapeutic agent that prevents or reduces development of CHIP, and/or an LY75 inhibitor, a CD164 inhibitor, or a PARP1 inhibitor, or any combination thereof, as described herein. For example, when the subject is LY75 reference, and therefore has an increased risk of developing CHIP, the subject is administered an LY75 inhibitor. In addition, when the subject is CD164 reference, and therefore has an increased risk of developing CHIP, the subject is administered a CD164 inhibitor. In addition, when the subject is PARP1 reference, and therefore has an increased risk of developing CHIP, the subject is administered a PARP1 inhibitor. In some embodiments, such a subject is also administered a therapeutic agent that prevents or reduces development of CHIP.

[0182] In some embodiments, such a subject is also administered a therapeutic agent that prevents or reduces development of CHIP. In some embodiments, when the subject is homozygous for one or more of an LY75, a CD164, or a PARP1 variant nucleic acid molecule, the subject is administered the therapeutic agent that prevents or reduces development of CHIP in a dosage amount that is the same as or less than a standard dosage amount.

[0183] In some embodiments, when the subject is heterozygous for an LY75 variant nucleic acid molecule, the subject is administered the therapeutic agent that prevents or reduces development of CHIP in a dosage amount that is the same as or less than a standard dosage amount, and is also administered an LY75 inhibitor. In some embodiments, when the subject is heterozygous for a CD164 variant nucleic acid molecule, the subject is administered the therapeutic agent that prevents or reduces development of CHIP in a dosage amount that is the same as or less than a standard dosage amount, and is also administered an CD164 inhibitor. In some embodiments, when the subject is heterozygous for a PARP1 variant nucleic acid molecule, the subject is administered the therapeutic agent that prevents or reduces development of CHIP in a dosage amount that is the same as or less than a standard dosage amount, and is also administered an PARP1 inhibitor.

[0184] In some embodiments, the subject is heterozygous for both an LY75 variant nucleic acid molecule and a CD164 variant nucleic acid molecule, and the subject is further administered or continued to be administered the therapeutic agent that prevents or reduces development of CHIP in an amount that is the same as or less than a standard dosage amount, and is administered an LY75 inhibitor, a CD164 inhibitor, or both.

[0185] In some embodiments, the subject is heterozygous for both an LY75 variant nucleic acid molecule and a PARP1 variant nucleic acid molecule, and the subject is further administered or continued to be administered the therapeutic agent that prevents or reduces development of CHIP in an amount that is the same as or less than a standard dosage amount, and is administered an LY75 inhibitor, a PARP1 inhibitor, or both.

[0186] In some embodiments, the subject is heterozygous for both a CD164 variant nucleic acid molecule and a PARP1 variant nucleic acid molecule, and the subject is further administered or continued to be administered the therapeutic agent that prevents or reduces development of CHIP in an amount that is the same as or less than a standard dosage amount, and is administered a CD164 inhibitor, a PARP1 inhibitor, or both.

[0187] In some embodiments, the subject is heterozygous for an LY75 variant nucleic acid molecule, a CD164 variant nucleic acid molecule, and a PARP1 variant nucleic acid molecule, and the subject is further administered or continued to be administered the therapeutic agent that prevents or reduces development of CHIP in an amount that is the same as or less than a standard dosage amount, and is administered an LY75 inhibitor, a CD164 inhibitor, a PARP1 inhibitor or any combination thereof.

[0188] In some embodiments, the subject is LY75, CD164, and PARP1 reference. In some embodiments, the subject is heterozygous for one or more of an LY75, a CD164, or a PARP1 variant nucleic acid molecule. In some embodiments, the subject is homozygous for one or more of an LY75, a CD164, or a PARP1 variant nucleic acid molecule.

[0189] The present disclosure also provides methods of identifying a subject having an increased risk of developing lung cancer. In some embodiments, the method comprises determining or having determined in a biological sample obtained from the subject the presence or absence of a CHIP somatic mutation in DNMT3A and/or ASXL1. When the subject lacks a CHIP somatic mutation in DNMT3A and/or ASXL1, then the subject does not have an increased risk of developing lung cancer. When the subject has a CHIP somatic mutation in DNMT3A and/or ASXL1, then the subject has an increased risk of developing lung cancer. In some embodiments, the subject is a smoker. In some embodiments, the subject is a non-smoker. In some embodiments, the CHIP somatic mutation is in DNMT3A. In some embodiments, the CHIP somatic mutation is in ASXL1. Subjects not having an increased risk of developing lung cancer because they lack a CHIP somatic mutation in DNMT3A and/or ASXL1, may still have an increased risk relative to the average individual for reasons such as smoking, breathing toxic chemicals at work, city pollution, etc.

[0190] Determining whether a subject has one or more CHIP somatic mutations in DNMT3A and/or ASXL1 can be carried out by any of the methods described herein. In some embodiments, these methods can be carried out in vitro. In some embodiments, these methods can be carried out in situ. In some embodiments, these methods can be carried out in vivo. In any of these embodiments, the nucleic acid molecule having the CHIP somatic mutation in DNMT3A and/or ASXL1 can be present within a cell obtained from the subject.

[0191] In some embodiments, when a subject is identified as having an increased risk of developing lung cancer, the subject can be subjected to enhanced monitoring, a lifestyle change, and/or lowering exposure to a hazardous substance. For example, a subject can be monitored more frequently for lung cancer pathology and/or symptoms. In some embodiments, such subjects can have chest x-rays, or the like, more frequently compared to subjects that do not have such an increased risk of developing lung cancer. In some embodiments, the subject can undergo additional monitoring for lung cancer-associated somatic mutations (such as EGFR mutations, KRAS mutations, etc.) using DNA from sputum and/or blood (i.e., more frequent cell-free DNA testing/monitoring). In some embodiments, enhanced surveillance options may include earlier magnetic resonance imaging (MRI) monitoring. In some embodiments, such subjects who are smokers can initiate smoking cessation procedures. In some embodiments, the lifestyle change can comprise lowering exposure to an environmental risk factor selected from second-hand smoke, radon, and workplace smoke exposure. In some embodiments, the hazardous substance is selected from asbestos, arsenic, nickel, chromium, beryllium, cadmium, silica, diesel exhaust, tar, or soot, or any combination thereof. In some embodiments, such subjects can undergo palliative or preventative treatment with a therapeutic agent. In some embodiments, the subject can be administered a therapeutically effective amount of erlotinib, 5-(p-methoxyphenyl)-1,2-dithiole-3-thione, deguelin, or iloporost, or any combination thereof.

[0192] In some embodiments, the subject has a CHIP somatic mutation in DNMT3A and/or ASXL1. In some embodiments, the subject does not have a CHIP somatic mutation in DNMT3A and/or ASXL1.

[0193] In any of the embodiments described herein, for subjects that are determined to have an increased risk of developing CHIP, such subjects that also carry a loss-of-function variant for TET2 (such as, for example, due to the presence of an INDEL; a TET2 somatic mutation deficiency) can undergo a treatment or prevention regimen that excludes treatment with a PARP1 inhibitor. Such subjects can be otherwise treated as described herein. Accordingly, subjects having a loss-of-function variant for TET2 and who have been determined to have an increased risk of developing CHIP can be excluded from the population of subjects amenable for treatment with a PARP1 inhibitor.

[0194] The biological sample for detection of a CHIP somatic mutation in DNMT3A and/or ASXL1 can be derived from any cell, tissue, or biological fluid from the subject. The biological sample may comprise any clinically relevant tissue, such as lung tissue or lung cells, such as from a biopsy, a fine needle aspirate, or a sample of bodily fluid, such as blood, gingival crevicular fluid, plasma, serum, lymph, ascitic fluid, cystic fluid, or urine. In some cases, the sample comprises a buccal swab. The biological sample used in the methods disclosed herein can vary based on the assay format, nature of the detection method, and the tissues, cells, or extracts that are used as the sample. The detection of a CHIP somatic mutation in DNMT3A and/or ASXL1 can be carried out by methods similar to detection of any of the variant nucleic acid molecules described herein using the appropriate primers and probes.

[0195] The lung cancer can comprise a non-small cell lung cancer, a small cell lung cancer, mesothelioma, lung carcinoid tumor, or a chest wall tumor. In some embodiments, the lung cancer comprises a non-small cell lung cancer. In some embodiments, the lung cancer comprises a small cell lung cancer. In some embodiments, the lung cancer comprises mesothelioma. In some embodiments, the lung cancer comprises a lung carcinoid tumor. In some embodiments, the lung cancer comprises a chest wall tumor.

[0196] In some embodiments, any of the methods described herein can further comprise determining the subject's burden of having one or more of an LY75, a CD164, or a PARP1 variant nucleic acid molecule, and/or one or more of an LY75, a CD164, or a PARP1 predicted loss-of-function variant polypeptide associated with a decreased risk of developing CHIP and CHIP-related disorders. The burden is the sum of all variants in the LY75 gene, the CD164 gene, and/or the PARP1 gene, which can be carried out in an association analysis with CHIP. In some embodiments, the subject is homozygous for one or more LY75 variant nucleic acid molecules associated with a decreased risk of developing CHIP. In some embodiments, the subject is heterozygous for one or more LY75 variant nucleic acid molecules associated with a decreased risk of developing CHIP. In some embodiments, the subject is homozygous for one or more CD164 variant nucleic acid molecules associated with a decreased risk of developing CHIP. In some embodiments, the subject is heterozygous for one or more CD164 variant nucleic acid molecules associated with a decreased risk of developing CHIP. In some embodiments, the subject is homozygous for one or more PARP1 variant nucleic acid molecules associated with a decreased risk of developing CHIP. In some embodiments, the subject is heterozygous for one or more PARP1 variant nucleic acid molecules associated with a decreased risk of developing CHIP.

[0197] The result of the association analysis suggests that LY75, CD164, and/or PARP1 variant nucleic acid molecules are associated with decreased risk of developing CHIP. When the subject has a lower burden, the subject is at a higher risk of developing CHIP and the subject is administered or continued to be administered the therapeutic agent that prevents or reduces development of CHIP in a standard dosage amount, and/or an LY75 inhibitor, a CD164 inhibitor, a PARP1 inhibitor, or any combination thereof. When the subject has a greater burden, the subject is at a lower risk of developing CHIP and the subject is administered or continued to be administered the therapeutic agent that prevents or reduces development of CHIP in an amount that is the same as or less than the standard dosage amount. The greater the burden, the lower the risk of developing CHIP. Alternately, the gene burden analysis can comprise determining whether CHIP carriers are more likely to have any of the variants aggregated in the burden framework due to their gene effects.

[0198] In some embodiments, the subject's burden of having any one or more of an LY75, a CD164, and/or a PARP1 variant nucleic acid molecule, or an LY75 predicted loss-of-function polypeptide, a CD164 predicted loss-of-function polypeptide, and/or a PARP1 predicted loss-of-function polypeptide represents a weighted sum of a plurality of any of the LY75, CD164, or PARP1 variant nucleic acid molecules or predicted loss-of-function polypeptides. In some embodiments, the burden is calculated using at least about 2, at least about 3, at least about 4, at least about 5, at least about 10, at least about 20, at least about 30, at least about 40, at least about 50, at least about 60, at least about 70, at least about 80, at least about 100, at least about 120, at least about 150, at least about 200, at least about 250, at least about 300, at least about 400, at least about 500, at least about 1,000, at least about 10,000, at least about 100,000, or at least about or more than 1,000,000 genetic variants present in or around (up to 10 Mb) the LY75 gene, the CD164 gene, or the PARP1 gene where the genetic burden is the number of alleles multiplied by the association estimate with CHIP or related outcome for each allele (e.g., a weighted polygenic burden score). This can include any genetic variants, regardless of their genomic amotation, in proximity to any one of the LY75 gene, the CD164 gene, and/or the PARP1 gene (up to 10 Mb around the gene) that show a non-zero association with CHIP-related traits in a genetic association analysis. In some embodiments, when the subject has a burden above a desired threshold score, the subject has a decreased risk of developing CHIP. In some embodiments, when the subject has a burden below a desired threshold score, the subject has an increased risk of developing CHIP.

[0199] In some embodiments, the burden may be divided into quintiles, e.g., top quintile, intermediate quintile, and bottom quintile, wherein the top quintile of burden corresponds to the lowest risk group and the bottom quintile of burden corresponds to the highest risk group. In some embodiments, a subject having a greater burden comprises the highest weighted burdens, including, but not limited to the top 10%, top 20%, top 30%, top 40%, or top 50% of burdens from a subject population. In some embodiments, the genetic variants comprise the genetic variants having association with CHIP in the top 10%, top 20%, top 30%, top 40%, or top 50% of p-value range for the association. In some embodiments, each of the identified genetic variants comprise the genetic variants having association with CHIP with p-value of no more than about 10⁻², no more than about 10⁻³, no more than about 10⁻⁴, no more than about 10⁻⁵, no more than about 10⁻⁶, no more than about 10⁻², no more than about 10⁻⁸, no more than about 10⁻⁹, no more than about 10⁻¹⁰, no more than about 10⁻¹¹, no more than about 10⁻¹², no more than about 10⁻¹³, no more than about 10⁻¹⁴, or no more than about or 10⁻¹⁵. In some embodiments, the identified genetic variants comprise the genetic variants having association with CHIP with p-value of less than 5×10⁻⁸. In some embodiments, the identified genetic variants comprise genetic variants having association with CHIP in high-risk subjects as compared to the rest of the reference population with odds ratio (OR) about 1.5 or greater, about 1.75 or greater, about 2.0 or greater, or about 2.25 or greater for the top 20% of the distribution; or about 1.5 or greater, about 1.75 or greater, about 2.0 or greater, about 2.25 or greater, about 2.5 or greater, or about 2.75 or greater. In some embodiments, the odds ratio (OR) may range from about 1.0 to about 1.5, from about 1.5 to about 2.0, from about 2.0 to about 2.5, from about 2.5 to about 3.0, from about 3.0 to about 3.5, from about 3.5 to about 4.0, from about 4.0 to about 4.5, from about 4.5 to about 5.0, from about 5.0 to about 5.5, from about 5.5 to about 6.0, from about 6.0 to about 6.5, from about 6.5 to about 7.0, or greater than 7.0. In some embodiments, high-risk subjects comprise subjects having burdens in the bottom decile, quintile, or tertile in a reference population. The threshold of the burden is determined on the basis of the nature of the intended practical application and the risk difference that would be considered meaningful for that practical application.

[0200] In some embodiments, when a subject is identified as having an increased risk of developing CHIP, the subject is further administered a therapeutic agent that prevents or reduces CHIP, and/or an LY75 inhibitor, a CD164 inhibitor, a PARP1 inhibitor, or any combination thereof, as described herein. For example, when the subject is LY75 reference, and therefore has an increased risk of developing CHIP, the subject is administered an LY75 inhibitor. In addition, when the subject CD164 reference, and therefore has an increased risk of developing CHIP, the subject is administered a CD164 inhibitor. In addition, when the subject PARP1 reference, and therefore has an increased risk of developing CHIP, the subject is administered a PARP1 inhibitor.

[0201] In some embodiments, such a subject is also administered a therapeutic agent that prevents or reduces development of CHIP. In some embodiments, when the subject is heterozygous for an LY75 variant nucleic acid molecule, the subject is administered the therapeutic agent that prevents or reduces development of CHIP in a dosage amount that is the same as or less than a standard dosage amount, and is also administered an LY75 inhibitor. In some embodiments, when the subject is heterozygous for a CD164 variant nucleic acid molecule, the subject is administered the therapeutic agent that prevents or reduces development of CHIP in a dosage amount that is the same as or less than a standard dosage amount, and is also administered a CD164 inhibitor. In some embodiments, when the subject is heterozygous for a PARP1 variant nucleic acid molecule, the subject is administered the therapeutic agent that prevents or reduces development of CHIP in a dosage amount that is the same as or less than a standard dosage amount, and is also administered a PARP1 inhibitor.

[0202] In some embodiments, the subject is LY75, CD164, and PARP1 reference. In some embodiments, the subject is heterozygous for one or more of an LY75, a CD164, or a PARP1 variant nucleic acid molecule. Furthermore, when the subject has a lower burden for having one or more of an LY75, a CD164, or a PARP1 variant nucleic acid molecule, and therefore has an increased risk of developing CHIP, the subject is administered a therapeutic agent that prevents or reduces development of CHIP. In some embodiments, when the subject has a lower burden for having one or more of an LY75, a CD164, or a PARP1 variant nucleic acid molecule, the subject is administered the therapeutic agent that prevents or reduces development of CHIP in a dosage amount that is the same as or greater than the standard dosage amount administered to a subject who has a greater burden for having one or more of an LY75, a CD164, or a PARP1 variant nucleic acid molecule.

[0203] In some embodiments, any of the methods described herein can further comprise determining the subject's burden of having a CHIP somatic mutation in DNMT3A and/or ASXL1 associated with an increased risk of developing lung cancer. The burden is the sum of all somatic mutations in the DNMT3A gene and/or ASXL1 gene, which can be carried out in an association analysis with lung cancer. In some embodiments, the subject has a CHIP somatic mutation in DNMT3A associated with an increased risk of developing lung cancer. In some embodiments, the subject does not have a CHIP somatic mutation in DNMT3A associated with an increased risk of developing lung cancer. In some embodiments, the subject has a CHIP somatic mutation in ASXL1 associated with an increased risk of developing lung cancer. In some embodiments, the subject does not have a CHIP somatic mutation in ASXL1 associated with an increased risk of developing lung cancer.

[0204] The result of the association analysis may indicate that DNMT3A and/or ASXL1 somatic mutations are associated with an increased risk of developing lung cancer. When the subject has a lower burden, the subject does not have an increased risk of developing lung cancer. When the subject has a greater burden, the subject has an increased risk of developing lung cancer, the subject can undergo any of the procedures described herein related to lung cancer. The greater the burden, the greater the risk of developing lung cancer.

[0205] Representative DNMT3A somatic mutations include:

| | | | | |
|---|---|---|---|---|
| 2:25234280:TACA | NA | frameshift | c.2727_2737delTG | p.Phe909fs |
| CACACGCA:T | | | CGTGTGTGT | |
| 2:25234286:C:A | NA | missense | c.2732G > T | p.Cys911Phe |
| 2:25234286:C:T | rs906113912 | missense | c.2732G > A | p.Cys911Tyr |
| 2:25234288:CG:C | | frameshift | c.2729delC | p.Ala910fs |
| 2:25234289:G:A | rs1459396018 | missense | c.2729C > T | p.Ala910Val |
| 2:25234289:G:C | NA | missense | c.2729C > G | p.Ala910Gly |
| 2:25234289:G:GC | NA | frameshift | c.2728dupG | p.Ala910fs |
| 2:25234289:GC:G | NA | frameshift | c.2728delG | p.Ala910fs |
| 2:25234290:C:CA | NA | frameshift | c.2727dupT | p.Ala910fs |
| 2:25234290:C:G | NA | missense | c.2728G > C | p.Ala910Pro |
| 2:25234290:C:T | NA | missense | c.2728G > A | p.Ala910Thr |
| 2:25234290:CA:C | | frameshift | c.2727delT | p.Phe909fs |
| 2:25234290:CAA: | | frameshift | c.2726_2727delTT | p.Phe909fs |
| C | | | | |
| 2:25234291:A:C | NA | missense | c.2727T > G | p.Phe909Leu |
| 2:25234291:A:T | NA | missense | c.2727T > A | p.Phe909Leu |
| 2:25234292:A:C | NA | missense | c.2726T > G | p.Phe909Cys |
| 2:25234292:A:G | NA | missense | c.2726T > C | p.Phe909Ser |
| 2:25234293:A:C | NA | missense | c.2725T > G | p.Phe909Val |
| 2:25234293:A:G | NA | missense | c.2725T > C | p.Phe909Leu |
| 2:25234293:A:T | rs1254967511 | missense | c.2725T > A | p.Phe909Ile |
| 2:25234294:A:C | NA | stop_gained | c.2724T > G | p.Tyr908* |
| 2:25234294:A:T | NA | stop_gained | c.2724T > A | p.Tyr908* |
| 2:25234294:AT:A | NA | frameshift | c.2723delA | p.Tyr908fs |
| 2:25234294:ATAC | NA | frameshift | c.2717_2723delAG | p.Lys906fs |
| TCCT:A | | | GAGTA | |
| 2:25234294:ATAC | NA | frameshift | c.2716_2723delAA | p.Lys906fs |
| TCCTT:A | | | GGAGTA | |
| 2:25234295:T:C | rs780666472 | missense | c.2723A > G | p.Tyr908Cys |
| 2:25234295:T:G | NA | missense | c.2723A > C | p.Tyr908Ser |
| 2:25234295:T:TA | NA | frameshift | c.2722dupT | p.Tyr908fs |
| 2:25234295:T:TA | NA | frameshift | c.2719_2722dupG | p.Tyr908fs |
| CTC | | | AGT | |
| 2:25234295:T:TG | NA | frameshift | c.2722_2723insTC | p.Tyr908fs |
| A | | | | |
| 2:25234295:TA:T | NA | frameshift | c.2722delT | p.Tyr908fs |
| 2:25234295:TACT | NA | frameshift | c.2719_2722delGA | p.Glu907fs |
| C:T | | | GT | |
| 2:25234296:A:C | NA | missense | c.2722T > G | p.Tyr908Asp |
| 2:25234296:A:T | | missense | c.2722T > A | p.Tyr908Asn |
| 2:25234296:AC:A | NA | frameshift | c.2721delG | p.Glu907fs |
| 2:25234297:CT:C | NA | frameshift | c.2720delA | p.Glu907fs |
| 2:25234298:T:A | NA | missense | c.2720A > T | p.Glu907Val |
| 2:25234298:T:C | NA | missense | c.2720A > G | p.Glu907Gly |
| 2:25234298:T:TC | NA | frameshift | c.2719dupG | p.Glu907fs |
| 2:25234298:TC:T | NA | frameshift | c.2719delG | p.Glu907fs |
| 2:25234298:TCCT | NA | frameshift | c.2703_2719delCTT | p.Phe902fs |
| TCAGCGGAGCGAAG: | | | CGCTCCGCTGAAGG | |
| T | | | | |
| 2:25234299:C:A | NA | stop_gained | c.2719G > T | p.Glu907* |
| 2:25234300:C:A | NA | missense | c.2718G > T | p.Lys906Asn |
| 2:25234300:C:CT | NA | frameshift | c.2717dupA | p.Glu907fs |
| 2:25234300:C:G | NA | missense | c.2718G > C | p.Lys906Asn |
| 2:25234300:CT:C | NA | frameshift | c.2717delA | p.Lys906fs |
| 2:25234300:CTTC | NA | frameshift | c.2714_2717delTG | p.Leu905fs |
| A:C | | | AA | |
| 2:25234302:T:A | NA | stop_gained | c.2716A > T | p.Lys906* |
| 2:25234302:T:C | rs1240890824 | missense | c.2716A > G | p.Lys906Glu |
| 2:25234302:TCAG | NA | frameshift | c.2697_2715delCC | p.His900fs |
| CGGAGCGAAGAG | | | ACCTCTTCGCTCCG | |
| GTGG:T | | | CTG | |
| 2:25234303:CA:C | NA | frameshift | c.2714delT | p.Leu905fs |
| 2:25234303:CAGC | NA | frameshift | c.2710_2714delCC | p.Pro904fs |
| GG:C | | | GCT | |
| 2:25234303:CAGC | NA | frameshift | c.2705_2714delTC | p.Phe902fs |
| GGAGCGA:C | | | GCTCCGCT | |
| 2:25234303:CAGC | NA | inframe_indel | c.2703_2714delCTT | p.Phe902_Leu905 |
| GGAGCGAAG:C | | | CGCTCCGCT | del |
| 2:25234304:A:C | rs751868166 | missense | c.2714T > G | p.Leu905Arg |
| 2:25234304:A:G | | missense | c.2714T > C | p.Leu905Pro |
| 2:25234304:A:T | rs751868166 | missense | c.2714T > A | p.Leu905Gln |
| 2:25234304:AGC | NA | frameshift | c.2701_2713delCT | p.Leu901fs |
| GGAGCGAAGAG: | | | CTTCGCTCCGC | |
| A | | | | |
| 2:25234305:G:C | NA | missense | c.2713C > G | p.Leu905Val |
| 2:25234305:G:T | NA | missense | c.2713C > A | p.Leu905Met |
| 2:25234306:C:CG | NA | frameshift | c.2711dupC | p.Leu905fs |
| 2:25234306:CG:C | NA | frameshift | c.2711delC | p.Pro904fs |
| 2:25234306:CGG | NA | frameshift | c.2701_2711delCT | p.Leu901fs |
| AGCGAAGAG:C | | | CTTCGCTCC | |
| 2:25234307:G:A | rs149095705 | missense | c.2711C > T | p.Pro904Leu |
| 2:25234307:G:C | rs149095705 | missense | c.2711C > G | p.Pro904Arg |
| 2:25234307:G:GG | NA | frameshift | c.2707_2710dupGC | p.Pro904fs |
| AGC | | | TC | |
| 2:25234307:G:T | rs149095705 | missense | c.2711C > A | p.Pro904Gln |
| 2:25234307:GGA | NA | frameshift | c.2707_2710delGC | p.Ala903fs |
| GC:G | | | TC | |
| 2:25234307:GGA | NA | frameshift | c.2704_2710delTTC | p.Phe902fs |
| GCGAA:G | | | GCTC | |
| 2:25234308:G:A | NA | missense | c.2710C > T | p.Pro904Ser |
| 2:25234308:G:C | NA | missense | c.2710C > G | p.Pro904Ala |
| 2:25234308:GAG | NA | frameshift | c.2705_2709delTC | p.Phe902fs |
| CGA:G | | | GCT | |
| 2:25234309:AGC: | NA | frameshift | c.2707_2708delGC | p.Ala903fs |
| A | | | | |
| 2:25234309:AGC | NA | frameshift | c.2698_2708delCA | p.His900fs |
| GAAGAGGTG:A | | | CCTCTTCGC | |
| 2:25234310:G:A | NA | missense | c.2708C > T | p.Ala903Val |
| 2:25234310:G:T | NA | missense | c.2708C > A | p.Ala903Asp |
| 2:25234310:GC:G | rs1323968409 | frameshift | c.2707delG | p.Ala903fs |
| 2:25234311:C:CG | NA | frameshift | c.2706dupC | p.Ala903fs |
| 2:25234311:C:CG | NA | frameshift | c.2666_2706dupTG | p.Ala903fs |
| AAGAGGTGGCGG | | | GGCCGGTCATGGA | |
| ATGACTGGCACGC | | | GCGTGCCAGTCATC | |
| TCCATGACCGGCC | | | CGCCACCTCTTC | |
| CA | | | | |
| 2:25234311:C:G | NA | missense | c.2707G > C | p.Ala903Pro |
| 2:25234311:C:T | rs749167103 | missense | c.2707G > A | p.Ala903Thr |
| 2:25234311:CG:C | | frameshift | c.2706delC | p.Phe902fs |
| 2:25234312:G:GA | NA | frameshift | c.2705dupT | p.Ala903fs |
| 2:25234312:G:GT | NA | frameshift | c.2705_2706insA | p.Phe902fs |
| 2:25234312:GAA: | NA | frameshift | c.2704_2705delTT | p.Phe902fs |
| G | | | | |
| 2:25234313:A:AA | NA | frameshift | c.2700_2704dupCC | p.Phe902fs |
| GAGG | | | TCT | |
| 2:25234313:A:G | rs587777510 | missense | c.2705T > C | p.Phe902Ser |
| 2:25234313:A:T | NA | missense | c.2705T > A | p.Phe902Tyr |
| 2:25234314:A:C | NA | missense | c.2704T > G | p.Phe902Val |
| 2:25234315:G:GA | NA | frameshift | c.2702dupT | p.Phe902fs |
| 2:25234315:GA:G | NA | frameshift | c.2702delT | p.Leu901fs |
| 2:25234316:A:C | rs774384800 | missense | c.2702T > G | p.Leu901Arg |
| 2:25234316:A:G | rs774384800 | missense | c.2702T > C | p.Leu901Pro |
| 2:25234316:A:T | NA | missense | c.2702T > A | p.Leu901His |
| 2:25234316:AG:A | NA | frameshift | c.2701delC | p.Leu901fs |
| 2:25234317:G:A | NA | missense | c.2701C > T | p.Leu901Phe |
| 2:25234317:G:C | rs1360815999 | missense | c.2701C > G | p.Leu901Val |
| 2:25234318:GT:G | NA | frameshift | c.2699delA | p.His900fs |
| 2:25234319:T:A | NA | missense | c.2699A > T | p.His900Leu |
| 2:25234319:T:G | NA | missense | c.2699A > C | p.His900Pro |
| 2:25234319:TG:T | NA | frameshift | c.2698delC | p.His900fs |
| 2:25234320:G:A | NA | missense | c.2698C > T | p.His900Tyr |
| 2:25234320:G:GG | NA | frameshift | c.2690_2697dupTC | p.His900fs |
| CGGATGA | | | ATCCGC | |
| 2:25234322:C:A | NA | missense | c.2696G > T | p.Arg899Leu |
| 2:25234322:C:G | rs1480791034 | missense | c.2696G > C | p.Arg899Pro |
| 2:25234322:C:T | NA | missense | c.2696G > A | p.Arg899His |
| 2:25234322:CG:C | NA | frameshift | c.2695delC | p.Arg899fs |
| 2:25234323:G:A | rs771922296 | missense | c.2695C > T | p.Arg899Cys |
| 2:25234323:G:C | NA | missense | c.2695C > G | p.Arg899Gly |
| 2:25234323:G:T | NA | missense | c.2695C > A | p.Arg899Ser |
| 2:25234324:G:GA | NA | frameshift | c.2678_2693dupG | p.Ile898fs |
| TGACTGGCACGCT | | | GAGCGTGCCAGTCA | |
| CC | | | T | |
| 2:25234324:GA:G | NA | frameshift | c.2693delT | p.Ile898fs |
| 2:25234324:GAT | NA | frameshift | c.2678_2693delGG | p.Trp893fs |
| GACTGGCACGCTC | | | AGCGTGCCAGTCAT | |
| C:G | | | | |
| 2:25234325:A:AT | NA | frameshift | c.2692dupA | p.Ile898fs |
| 2:25234325:A:C | NA | missense | c.2693T > G | p.Ile898Ser |
| 2:25234325:A:G | NA | missense | c.2693T > C | p.Ile898Thr |
| 2:25234325:A:T | rs960019580 | missense | c.2693T > A | p.Ile898Asn |
| 2:25234326:T:C | NA | missense | c.2692A > G | p.Ile898Val |
| 2:25234327:GA:G | NA | frameshift | c.2690delT | p.Va1897fs |
| 2:25234327:GACT | NA | inframe_indel | c.2685_2690delGC | p.Pro896_Va1897 |
| GGC:G | | | CAGT | del |
| 2:25234328:A:C | NA | missense | c.2690T > G | p.Va1897Gly |
| 2:25234328:A:T | NA | missense | c.2690T > A | p.Va1897Asp |
| 2:25234328:ACTG | NA | frameshift | c.2686_2689delCC | p.Pro896fs |
| G:A | | | AG | |
| 2:25234329:C:CT | NA | frameshift | c.2688dupA | p.Va1897fs |
| 2:25234329:C:CT | NA | frameshift | c.2688_2689insTG | p.Va1897fs |
| GGCACGGTCA | | | ACCGTGCCA | |
| 2:25234329:C:G | NA | missense | c.2689G > C | p.Va1897Leu |
| 2:25234329:CT:C | NA | frameshift | c.2688delA | p.Va1897fs |
| 2:25234330:T:TG | NA | frameshift | c.2672_2687dupG | p.Ile898fs |
| GCACGCTCCATGA | | | GTCATGGAGCGTGC | |
| CC | | | C | |
| 2:25234330:T:TG | NA | frameshift | c.2687_2688insGC | p.Va1897fs |
| GGC | | | CC | |
| 2:25234330:TG:T | NA | frameshift | c.2687delC | p.Pro896fs |
| 2:25234331:G:A | NA | missense | c.2687C > T | p.Pro896Leu |
| 2:25234332:G:GA | NA | frameshift | c.2685_2686insGA | p.Pro896fs |
| ACGCTC | | | GCGTT | |
| 2:25234333:C:CA | NA | frameshift | c.2684dupT | p.Pro896fs |
| 2:25234333:C:CA | NA | frameshift | c.2680_2684dupA | p.Pro896fs |
| CGCT | | | GCGT | |
| 2:25234334:A:T | NA | missense | c.2684T > A | p.Va1895Glu |
| 2:25234335:C:T | rs762126968 | missense | c.2683G > A | p.Va1895Met |
| 2:25234336:G:C | NA | missense | c.2682C > G | p.Ser894Arg |
| 2:25234336:GCTC | NA | frameshift | c.2659_2681delAG | p.Leu888fs |
| CATGACCGGCCCA | | | ACTGCTGGGCCGGT | |
| GCAGTCT:G | | | CATGGAG | |
| 2:25234337:C:CT | NA | frameshift | c.2680dupA | p.Ser894fs |
| 2:25234337:C:T | NA | missense | c.2681G > A | p.Ser894Asn |
| 2:25234338:T:C | NA | missense | c.2680A > G | p.Ser894Gly |
| 2:25234338:T:TC | NA | frameshift | c.2679dupG | p.Ser894fs |
| 2:25234338:T:TCC | NA | frameshift | c.2667_2679dupG | p.Ser894fs |
| ATGACCGGCCC | | | GGCCGGTCATGG | |
| 2:25234339:C:A | NA | missense | c.2679G > T | p.Trp893Cys |
| 2:25234339:C:T | rs1330526945 | stop_gained | c.2679G > A | p.Trp893* |
| 2:25234340:C:G | NA | missense | c.2678G > C | p.Trp893Ser |
| 2:25234340:C:T | rs750515748 | stop_gained | c.2678G > A | p.Trp893* |
| 2:25234341:A:G | NA | missense | c.2677T > C | p.Trp893Arg |
| 2:25234341:A:T | NA | missense | c.2677T > A | p.Trp893Arg |
| 2:25234342:T:TG | NA | frameshift | c.2675dupC | p.Trp893fs |
| 2:25234342:TGAC | NA | frameshift | c.2672_2675delGG | p.Arg891fs |
| C:T | | | TC | |
| 2:25234343:G:A | rs1355266109 | missense | c.2675C > T | p.Ser892Leu |
| 2:25234343:G:C | NA | stop_gained | c.2675C > G | p.Ser892* |
| 2:25234343:G:T | NA | stop_gained | c.2675C > A | p.Ser892* |
| 2:25234343:GA:G | NA | frameshift | c.2674delT | p.Ser892fs |
| 2:25234344:A:AC | NA | frameshift | c.2670_2673dupCC | p.Ser892fs |
| CGG | | | GG | |
| 2:25234344:AC:A | NA | frameshift | c.2673delG | p.Ser892fs |
| 2:25234344:ACCG | NA | frameshift | c.2670_2673delCC | p.Arg891fs |
| G:A | | | GG | |
| 2:25234344:ACCG | NA | frameshift | c.2660_2673delGA | p.Arg887fs |
| GCCCAGCAGTC:A | | | CTGCTGGGCCGG | |
| 2:25234346:C:T | rs1389510486 | missense | c.2672G > A | p.Arg891Gln |
| 2:25234346:CG:C | rs762357545 | frameshift | c.2671delC | p.Arg891fs |
| 2:25234347:G:A | NA | missense | c.2671C > T | p.Arg891Trp |
| 2:25234347:G:C | NA | missense | c.2671C > G | p.Arg891Gly |
| 2:25234347:G:GG | NA | frameshift | c.2667_2670dupG | p.Arg891fs |
| CCC | | | GGC | |
| 2:25234348:G:GC | rs766070325 | frameshift | c.2669dupG | p.Arg891fs |
| 2:25234348:G:GC | NA | frameshift | c.2668_2669dupG | p.Arg891fs |
| C | | | G | |
| 2:25234348:GC:G | NA | frameshift | c.2669delG | p.Gly890fs |
| 2:25234348:GCC: | NA | frameshift | c.2668_2669delGG | p.Gly890fs |
| G | | | | |
| 2:25234349:C:T | rs752160822 | missense | c.2669G > A | p.Gly890Asp |
| 2:25234349:CCCA | NA | frameshift | c.2659_2668delAG | p.Arg887fs |
| GCAGTCT:C | | | ACTGCTGG | |
| 2:25234350:C:G | NA | missense | c.2668G > C | p.Gly890Arg |
| 2:25234350:C:T | NA | missense | c.2668G > A | p.Gly890Ser |
| 2:25234351:CAGC | NA | frameshift | c.2657_2666delAG | p.Gln886fs |
| AGTCTCT:C | | | AGACTGCT | |
| 2:25234352:A:C | NA | missense | c.2666T > G | p.Leu889Arg |
| 2:25234352:A:G | NA | missense | c.2666T > C | p.Leu889Pro |
| 2:25234352:A:T | NA | missense | c.2666T > A | p.Leu889Gln |
| 2:25234354:C:CA | NA | frameshift | c.2662_2663dupCT | p.Leu889fs |
| G | | | | |
| 2:25234354:CA:C | NA | frameshift | c.2663delT | p.Leu888fs |
| 2:25234354:CAG: | NA | frameshift | c.2662_2663delCT | p.Leu888fs |
| C | | | | |
| 2:25234355:A:G | NA | missense | c.2663T > C | p.Leu888Pro |
| 2:25234355:A:T | NA | missense | c.2663T > A | p.Leu888Gln |
| 2:25234355:AG:A | NA | frameshift | c.2662delC | p.Leu888fs |
| 2:25234355:AGTC | NA | frameshift | c.2644_2662delCG | p.Arg882fs |
| TCTGCCTCGCCAA | | | CTTGGCGAGGCAG | |
| GCG:A | | | AGAC | |
| 2:25234356:G:GT | NA | frameshift | c.2660_2661dupG | p.Leu888fs |
| C | | | A | |
| 2:25234356:GT:G | NA | frameshift | c.2661delA | p.Arg887fs |
| 2:25234356:GTC: | NA | frameshift | c.2660_2661delGA | p.Arg887fs |
| G | | | | |
| 2:25234356:GTCT | NA | frameshift | c.2658_2661delGA | p.Gln886fs |
| C:G | | | GA | |
| 2:25234357:T:G | NA | missense | c.2661A > C | p.Arg887Ser |
| 2:25234357:TCTC | NA | inframe_indel | c.2655_2660delGC | p.Gln886_Arg887 |
| TGC:T | | | AGAG | del |
| 2:25234358:C:A | NA | missense | c.2660G > T | p.Arg887Ile |
| 2:25234359:T:A | NA | stop_gained | c.2659A > T | p.Arg887* |
| 2:25234359:T:C | NA | missense | c.2659A > G | p.Arg887Gly |
| 2:25234360:C:CG | NA | frameshift | c.2657_2658insC | p.Gln886fs |
| 2:25234360:CT:C | NA | frameshift | c.2657delA | p.Gln886fs |
| 2:25234361:T:C | NA | missense | c.2657A > G | p.Gln886Arg |
| 2:25234362:G:A | rs752280049 | stop_gained | c.2656C > T | p.Gln886* |
| 2:25234362:G:C | rs752280049 | missense | c.2656C > G | p.Gln886Glu |
| 2:25234362:G:T | NA | missense | c.2656C > A | p.Gln886Lys |
| 2:25234362:GC:G | NA | frameshift | c.2655delG | p.Arg885fs |
| 2:25234364:C:A | NA | missense | c.2654G > T | p.Arg885Met |
| 2:25234364:C:T | NA | missense | c.2654G > A | p.Arg885Lys |
| 2:25234364:CT:C | NA | frameshift | c.2653delA | p.Arg885fs |
| 2:25234365:TC:T | NA | frameshift | c.2652delG | p.Arg885fs |
| 2:25234366:CGCC | NA | frameshift | c.2638_2651delAT | p.Met880fs |
| AAGCGGCTCAT:C | | | GAGCCGCTTGGC | |
| 2:25234367:G:A | rs559023562 | missense | c.2651C > T | p.Ala884Val |
| 2:25234367:G:GC | NA | frameshift | c.2649_2650dupG | p.Ala884fs |
| C | | | G | |
| 2:25234367:GCG | | frameshift | c.2650delG | p.Ala884fs |
| 2:25234367:GCCA | NA | frameshift | c.2641_2650delAG | p.Ser881fs |
| AGCGGCT:G | | | CCGCTTGG | |
| 2:25234369:C:A | NA | missense | c.2649G > T | p.Leu883Phe |
| 2:25234369:CA:C | NA | frameshift | c.2648delT | p.Leu883fs |
| 2:25234370:A:AC | NA | frameshift | c.2647_2648insG | p.Leu883fs |
| 2:25234370:A:T | rs1307673132 | stop_gained | c.2648T > A | p.Leu883* |
| 2:25234372:GCG | NA | frameshift | c.2630_2645delTCT | p.Va1877fs |
| GCTCATGTTGGAG | | | CCAACATGAGCCG | |
| A:G | | | | |
| 2:25234373:C:A | rs147001633 | missense | c.2645G > T | p.Arg882Leu |
| 2:25234373:C:G | rs147001633 | missense | c.2645G > C | p.Arg882Pro |
| 2:25234373:C:T | rs147001633 | missense | c.2645G > A | p.Arg882His |
| 2:25234373:CG:C | NA | frameshift | c.2644delC | p.Arg882fs |
| 2:25234373:CGG | NA | frameshift | c.2634_2644delCA | p.Asn879fs |
| CTCATGTTG:C | | | ACATGAGCC | |
| 2:25234374:G:A | rs377577594 | missense | c.2644C > T | p.Arg882Cys |
| 2:25234374:G:C | rs377577594 | missense | c.2644C > G | p.Arg882Gly |
| 2:25234374:G:T | rs377577594 | missense | c.2644C > A | p.Arg882Ser |
| 2:25234376:C:CT | NA | frameshift | c.2628_2641dupCG | p.Ser881fs |
| CATGTTGGAGAC | | | TCTCCAACATGA | |
| G | | | | |
| 2:25234376:CT:C | NA | frameshift | c.2641delA | p.Ser881fs |
| 2:25234377:T:TC | NA | frameshift | c.2639_2640dupTG | p.Ser881fs |
| A | | | | |
| 2:25234378:C:A | NA | missense | c.2640G > T | p.Met880Ile |
| 2:25234378:C:CA | NA | frameshift | c.2639dupT | p.Met880fs |
| 2:25234378:C:G | NA | missense | c.2640G > C | p.Met880Ile |
| 2:25234378:C:T | NA | missense | c.2640G > A | p.Met880Ile |
| 2:25234378:CA:C | NA | frameshift | c.2639delT | p.Met880fs |
| 2:25234379:AT:A | NA | frameshift | c.2638delA | p.Met880fs |
| 2:25234379:ATGT | NA | frameshift | c.2635_2638delAA | p.Asn879fs |
| T:A | | | CA | |
| 2:25234379:ATGT | NA | frameshift | c.2614_2638delGT | p.Va1872fs |
| TGGAGACGTCAG | | | CCACTATACTGACG | |
| TATAGTGGAC:A | | | TCTCCAACA | |
| 2:25234380:T:A | NA | missense | c.2638A > T | p.Met880Leu |
| 2:25234380:T:C | rs775365749 | missense | c.2638A > G | p.Met880Val |
| 2:25234380:TG:T | NA | frameshift | c.2637delC | p.Asn879fs |
| 2:25234381:GT:G | NA | frameshift | c.2636delA | p.Asn879fs |
| 2:25234382:T:C | NA | missense | c.2636A > G | p.Asn879Ser |
| 2:25234383:T:C | rs1188120438 | missense | c.2635A > G | p.Asn879Asp |
| 2:25234383:T:TG | NA | frameshift | c.2634dupC | p.Asn879fs |
| 2:25234383:T:TG | NA | frameshift | c.2633_2634dupCC | p.Asn879fs |
| G | | | | |
| 2:25234384:G:GG | NA | frameshift | c.2632_2633dupTC | p.Asn879fs |
| A | | | | |
| 2:25234385:GAG | NA | frameshift | c.2626_2632delGA | p.Asp876fs |
| ACGTC:G | | | CGTCT | |
| 2:25234386:A:G | NA | missense | c.2632T > C | p.Ser878Pro |
| 2:25234387:GA:G | NA | frameshift | c.2630delT | p.Va1877fs |
| 2:25234388:AC:A | NA | frameshift | c.2629delG | p.Va1877fs |
| 2:25234389:C:A | NA | missense | c.2629G > T | p.Va1877Phe |
| 2:25234389:C:CG | NA | frameshift | c.2625_2628dupTG | p.Va1877fs |
| TCA | | | AC | |
| 2:25234389:C:T | NA | missense | c.2629G > A | p.Va1877Ile |
| 2:25234389:CG:C | NA | frameshift | c.2628delC | p.Asp876fs |
| 2:25234389:CGTC | NA | frameshift | c.2625_2628delTG | p.Asp876fs |
| A:C | | | AC | |
| 2:25234390:G:GT | rs774080362 | frameshift | c.2627dupA | p.Asp876fs |
| 2:25234390:G:T | NA | missense | c.2628C > A | p.Asp876Glu |
| 2:25234390:GT:G | NA | frameshift | c.2627delA | p.Asp876fs |
| 2:25234391:T:A | NA | missense | c.2627A > T | p.Asp876Val |
| 2:25234391:T:C | NA | missense | c.2627A > G | p.Asp876Gly |
| 2:25234391:T:G | NA | missense | c.2627A > C | p.Asp876Ala |
| 2:25234391:T:TC | NA | frameshift | c.2626dupG | p.Asp876fs |
| 2:25234391:TC:T | NA | frameshift | c.2626delG | p.Asp876fs |
| 2:25234391:TCA: | NA | frameshift | c.2625_2626delTG | p.Asp876fs |
| T | | | | |
| 2:25234392:C:G | NA | missense | c.2626G > C | p.Asp876His |
| 2:25234392:C:T | rs992291948 | missense | c.2626G > A | p.Asp876Asn |
| 2:25234392:CA:C | NA | frameshift | c.2625delT | p.Asp876fs |
| 2:25234392:CAGT | NA | frameshift | c.2621_2625delAT | p.Tyr874fs |
| AT:C | | | ACT | |
| 2:25234394:G:A | NA | missense | c.2624C > T | p.Thr875Ile |
| 2:25234394:G:C | NA | missense | c.2624C > G | p.Thr875Ser |
| 2:25234394:G:GT | NA | frameshift | c.2622_2623dupTA | p.Thr875fs |
| A | | | | |
| 2:25234394:GTA: | NA | frameshift | c.2622_2623delTA | p.Thr875fs |
| G | | | | |
| 2:25234395:T:C | NA | missense | c.2623A > G | p.Thr875Ala |
| 2:25234396:A:AT | NA | frameshift | c.2621dupA | p.Tyr874fs |
| 2:25234396:A:C | NA | stop_gained | c.2622T > G | p.Tyr874* |
| 2:25234396:A:T | rs770134132 | stop_gained | c.2622T > A | p.Tyr874* |
| 2:25234397:T:A | NA | missense | c.2621A > T | p.Tyr874Phe |
| 2:25234397:T:C | NA | missense | c.2621A > G | p.Tyr874Cys |
| 2:25234397:TA:T | NA | frameshift | c.2620delT | p.Tyr874fs |
| 2:25234398:A:T | NA | missense | c.2620T > A | p.Tyr874Asn |
| 2:25234399:G:C | NA | missense | c.2619C > G | p.His873Gln |
| 2:25234400:T:C | rs1280811819 | missense | c.2618A > G | p.His873Arg |
| 2:25234400:T:TG | NA | frameshift | c.2617dupC | p.His873fs |
| 2:25234400:TG:T | NA | frameshift | c.2617delC | p.His873fs |
| 2:25234400:TGG | NA | frameshift | c.2611_2617delCC | p.Pro871fs |
| ACTGG:T | | | AGTCC | |
| 2:25234401:G:A | rs773610723 | missense | c.2617C > T | p.His873Tyr |
| 2:25234401:G:C | NA | missense | c.2617C > G | p.His873Asp |
| 2:25234403:AC:A | NA | frameshift | c.2614delG | p.Va1872fs |
| 2:25234403:ACTG | NA | frameshift | c.2598_2614delGG | p.Arg866fs |
| GGAAACCAAATAC | | | TATTTGGTTTCCCA | |
| C:A | | | G | |
| 2:25234404:C:T | NA | missense | c.2614G > A | p.Va1872Ile |
| 2:25234404:CT:C | NA | frameshift | c.2613delA | p.Va1872fs |
| 2:25234405:T:TG | NA | frameshift | c.2611_2612dupCC | p.Va1872fs |
| G | | | | |
| 2:25234405:TG:T | rs760010938 | frameshift | c.2612delC | p.Pro871fs |
| 2:25234405:TGG: | NA | frameshift | c.2611_2612delCC | p.Pro871fs |
| T | | | | |
| 2:25234406:G:A | rs1419990763 | missense | c.2612C > T | p.Pro871Leu |
| 2:25234407:G:C | NA | missense | c.2611C > G | p.Pro871Ala |
| 2:25234408:GA:G | NA | frameshift | c.2609delT | p.Phe870fs |
| 2:25234408:GAA: | NA | frameshift | c.2608_2609delTT | p.Phe870fs |
| G | | | | |
| 2:25234409:A:C | NA | missense | c.2609T > G | p.Phe870Cys |
| 2:25234411:AC:A | NA | frameshift | c.2606delG | p.Gly869fs |
| 2:25234412:C:A | NA | missense | c.2606G > T | p.Gly869Val |
| 2:25234412:C:G | NA | missense | c.2606G > C | p.Gly869Ala |
| 2:25234412:C:T | NA | missense | c.2606G > A | p.Gly869Asp |
| 2:25234413:C:CA | NA | frameshift | c.2601_2604dupAT | p.Gly869fs |
| AAT | | | TT | |
| 2:25234413:C:G | NA | missense | c.2605G > C | p.Gly869Arg |
| 2:25234413:C:T | | missense | c.2605G > A | p.Gly869Ser |
| 2:25234413:CA:C | rs753089697 | frameshift | c.2604delT | p.Phe868fs |
| 2:25234414:A:C | rs1239050589 | missense | c.2604T > G | p.Phe868Leu |
| 2:25234414:A:T | NA | missense | c.2604T > A | p.Phe868Leu |
| 2:25234415:A:C | NA | missense | c.2603T > G | p.Phe868Cys |
| 2:25234415:A:G | NA | missense | c.2603T > C | p.Phe868Ser |
| 2:25234415:A:T | NA | missense | c.2603T > A | p.Phe868Tyr |
| 2:25234416:A:C | NA | missense | c.2602T > G | p.Phe868Val |
| 2:25234416:A:G | NA | missense | c.2602T > C | p.Phe868Leu |
| 2:25234417:T:TA | NA | frameshift | c.2600dupT | p.Phe868fs |
| 2:25234417:TACC | NA | splice_acceptor | c.2598- | p.Va1867del |
| CTGGGGGAGAAA | | | 26_2600delTGCCCT | |
| AGGCAGAGAGGG | | | CTCTGCCTTTTCTCC | |
| CA:T | | | CCCAGGGT | |
| 2:25234418:AC:A | rs761283545 | frameshift | c.2599delG | p.Va1867fs |
| 2:25234418:ACCC | NA | frameshift | c.2598- | p.Arg866fs |
| TGGGG:A | | | 6_2599delCCCCAG | |
| | | | GG | |
| 2:25234420:CCTG: | NA | splice_acceptor | c.2598-3_2598- | |
| C | | | 1delCAG | |
| 2:25234420:CCTG | NA | splice_acceptor | c.2598-6_2598- | |
| GGG:C | | | 1delCCCCAG | |
| 2:25234421:C:A | rs766506181 | splice_acceptor | c.2598-1G > T | |
| 2:25234421:C:G | rs766506181 | splice_acceptor | c.2598-1G > C | |
| 2:25234421:C:T | rs766506181 | splice_acceptor | c.2598-1G > A | |
| 2:25234421:CT:C | NA | splice_acceptor | c.2598-2delA | |
| 2:25234422:T:A | NA | splice_acceptor | c.2598-2A > T | |
| 2:25234422:T:C | rs760092360 | splice_acceptor | c.2598-2A > G | |
| 2:25234422:T:G | NA | splice_acceptor | c.2598-2A > C | |
| 2:25235702:GGT | NA | splice_donor | c.2586_2597+4delT | p.Glu863_Arg866 |
| ACCTTTCCATTTCA: | | | GAAATGGAAAGGT | del |
| G | | | AC | |
| 2:25235705:A:C | NA | splice_donor | c.2597+2T > G | |
| 2:25235705:A:G | NA | splice_donor | c.2597+2T > C | |
| 2:25235705:AC:A | NA | splice_donor | c.2597+1delG | |
| 2:25235706:C:T | rs764855628 | splice_donor | c.2597+1G > A | |
| 2:25235707:C:CT | NA | frameshift | c.2596dupA | p.Arg866fs |
| 2:25235707:C:CTT | NA | frameshift | c.2574_2596dupCT | p.Arg866fs |
| TCCATTTCAGTGC | | | TATGGTGCACTGAA | |
| ACCATAAG | | | ATGGAAA | |
| 2:25235707:C:T | NA | missense | c.2597G > A | p.Arg866Lys |
| 2:25235707:CT:C | NA | frameshift | c.2596delA | p.Arg866fs |
| 2:25235710:T:A | rs1187041748 | missense | c.2594A > T | p.Glu865Val |
| 2:25235710:T:C | NA | missense | c.2594A > G | p.Glu865Gly |
| 2:25235710:T:G | NA | missense | c.2594A > C | p.Glu865Ala |
| 2:25235711:C:CC | NA | frameshift | c.2588_2592dupAA | p.Glu865fs |
| ATTT | | | ATG | |
| 2:25235712:CA:C | NA | frameshift | c.2591delT | p.Met864fs |
| 2:25235713:A:G | NA | missense | c.2591T > C | p.Met864Thr |
| 2:25235713:AT:A | NA | frameshift | c.2590delA | p.Met864fs |
| 2:25235713:ATTT | NA | frameshift | c.2566_2590delGA | p.Glu856fs |
| CAGTGCACCATAA | | | GGACATCTTATGGT | |
| GATGTCCTC:A | | | GCACTGAAA | |
| 2:25235716:T:A | NA | missense | c.2588A > T | p.Glu863Val |
| 2:25235717:C:A | NA | stop_gained | c.2587G > T | p.Glu863* |
| 2:25235717:C:T | NA | missense | c.2587G > A | p.Glu863Lys |
| 2:25235718:A:AG | NA | frameshift | c.2584_2585dupAC | p.Glu863fs |
| T | | | | |
| 2:25235718:AGT: | NA | frameshift | c.2584_2585delAC | p.Thr862fs |
| A | | | | |
| 2:25235718:AGT | NA | inframe_indel | c.2577_2585delAT | p.Leu859_Thr862 |
| GCACCAT:A | | | GGTGCAC | delinsPhe |
| 2:25235719:G:A | NA | missense | c.2585C > T | p.Thr862Ile |
| 2:25235719:G:T | NA | missense | c.2585C > A | p.Thr862Asn |
| 2:25235719:GTGC | NA | frameshift | c.2578_2584delTG | p.Trp860fs |
| ACCA:G | | | GTGCA | |
| 2:25235720:TG:T | NA | frameshift | c.2583delC | p.Cys861fs |
| 2:25235721:G:T | NA | stop_gained | c.2583C > A | p.Cys861* |
| 2:25235722:C:T | NA | missense | c.2582G > A | p.Cys861Tyr |
| 2:25235722:CACC | NA | frameshift | c.2578_2581delTG | p.Trp860fs |
| A:C | | | GT | |
| 2:25235723:A:AC | NA | frameshift | c.2580dupG | p.Cys861fs |
| 2:25235723:A:G | NA | missense | c.2581T > C | p.Cys861Arg |
| 2:25235723:ACCA | NA | frameshift | c.2556_2580delGA | p.Met852fs |
| TAAGATGTCCTCT | | | ATGAGAAAGAGGA | |
| TTCTCATTC:A | | | CATCTTATGG | |
| 2:25235724:C:G | NA | missense | c.2580G > C | p.Trp860Cys |
| 2:25235724:C:T | rs376830288 | stop_gained | c.2580G > A | p.Trp860* |
| 2:25235725:C:G | NA | missense | c.2579G > C | p.Trp860Ser |
| 2:25235725:C:T | rs1321116253 | stop_gained | c.2579G > A | p.Trp860* |
| 2:25235725:CAT: | NA | frameshift | c.2577_2578delAT | p.Trp860fs |
| C | | | | |
| 2:25235725:CATA | NA | frameshift | c.2575_2578delTT | p.Leu859fs |
| A:C | | | AT | |
| 2:25235726:A:AT | rs764502627 | frameshift | c.2577dupA | p.Trp860fs |
| 2:25235726:A:C | NA | missense | c.2578T > G | p.Trp860Gly |
| 2:25235726:A:G | rs373014701 | missense | c.2578T > C | p.Trp860Arg |
| 2:25235726:A:T | NA | missense | c.2578T > A | p.Trp860Arg |
| 2:25235726:ATAA | NA | frameshift | c.2571_2577delCA | p.Ile858fs |
| GATG:A | | | TCTTA | |
| 2:25235726:ATAA | NA | frameshift | c.2565_2577delAG | p.Lys855fs |
| GATGTCCTCT:A | | | AGGACATCTTA | |
| 2:25235726:ATAA | NA | frameshift | c.2562_2577delGA | p.Glu854fs |
| GATGTCCTGTTTC: | | | AAGAGGACATCTTA | |
| A | | | | |
| 2:25235727:T:TC | NA | frameshift | c.2576_2577insG | p.Trp860fs |
| 2:25235727:TA:T | NA | frameshift | c.2576delT | p.Leu859fs |
| 2:25235728:A:C | rs1175622747 | stop_gained | c.2576T > G | p.Leu859* |
| 2:25235728:A:T | NA | stop_gained | c.2576T > A | p.Leu859* |
| 2:25235732:TG:T | NA | frameshift | c.2571delC | p.Asp857fs |
| 2:25235734:T:TCC | NA | frameshift | c.2568_2569dupG | p.Asp857fs |
| | | | G | |
| 2:25235734:TC:T | rs1254668110 | frameshift | c.2569delG | p.Asp857fs |
| 2:25235735:C:T | NA | missense | c.2569G > A | p.Asp857Asn |
| 2:25235735:CCT: | rs754004583 | frameshift | c.2567_2568delAG | p.Glu856fs |
| C | | | | |
| 2:25235736:CTCT | NA | frameshift | c.2564_2567delAA | p.Lys855fs |
| T:C | | | GA | |
| 2:25235737:TCTT | NA | frameshift | c.2553_2566delCA | p.Phe851fs |
| TCTCATTCATG:T | | | TGAATGAGAAAG | |
| 2:25235738:C:A | NA | stop_gained | c.2566G > T | p.Glu856* |
| 2:25235738:C:CT | NA | frameshift | c.2565dupA | p.Glu856fs |
| 2:25235738:CT:C | NA | frameshift | c.2565delA | p.Glu856fs |
| 2:25235738:CTT:C | NA | frameshift | c.2564_2565delAA | p.Lys855fs |
| 2:25235740:T:A | NA | missense | c.2564A > T | p.Lys855Ile |
| 2:25235740:TTCT | NA | frameshift | c.2560_2563delGA | p.Glu854fs |
| C:T | | | GA | |
| 2:25235741:T:A | NA | stop_gained | c.2563A > T | p.Lys855* |
| 2:25235742:CTCA | NA | frameshift | c.2557_2561delAA | p.Asn853fs |
| TT:C | | | TGA | |
| 2:25235743:TC:T | NA | frameshift | c.2560delG | p.Glu854fs |
| 2:25235744:CATT | NA | frameshift | c.2553_2559delCA | p.Phe851fs |
| CATG:C | | | TGAAT | |
| 2:25235745:AT:A | NA | frameshift | c.2558delA | p.Asn853fs |
| 2:25235748:C:CA | NA | frameshift | c.2555dupT | p.Met852fs |
| 2:25235749:A:T | NA | missense | c.2555T > A | p.Met852Lys |
| 2:25235749:ATG: | NA | frameshift | c.2553_2554delCA | p.Met852fs |
| A | | | | |
| 2:25235749:ATGA | NA | frameshift | c.2538_2554delGC | p.Gln846fs |
| AGACAGGAAAAT | | | ATTTTCCTGTCTTCA | |
| GC:A | | | | |
| 2:25235750:T:C | rs746967478 | missense | c.2554A > G | p.Met852Val |
| 2:25235750:T:G | NA | missense | c.2554A > C | p.Met852Leu |
| 2:25235750:T:TG | NA | frameshift | c.2553dupC | p.Met852fs |
| 2:25235750:TG:T | rs757223824 | frameshift | c.2553delC | p.Phe851fs |
| 2:25235751:G:GA | NA | frameshift | c.2552dupT | p.Met852fs |
| 2:25235751:GA:G | NA | frameshift | c.2552delT | p.Phe851fs |
| 2:25235751:GAA | NA | frameshift | c.2549_2552delTCT | p.Va1850fs |
| GA:G | | | T | |
| 2:25235751:GAA | NA | frameshift | c.2548_2552delGT | p.Va1850fs |
| GAC:G | | | CTT | |
| 2:25235752:AAG: | rs779108270 | frameshift | c.2550_2551delCT | p.Phe851fs |
| A | | | | |
| 2:25235754:G:GA | NA | frameshift | c.2549dupT | p.Phe851fs |
| 2:25235754:GAC: | NA | frameshift | c.2548_2549delGT | p.Va1850fs |
| G | | | | |
| 2:25235755:AC:A | rs1175091304 | frameshift | c.2548delG | p.Va1850fs |
| 2:25235756:C:G | NA | missense | c.2548G > C | p.Va1850Leu |
| 2:25235756:C:T | NA | missense | c.2548G > A | p.Va1850Ile |
| 2:25235756:CA:C | NA | frameshift | c.2547delT | p.Va1850fs |
| 2:25235756:CAG: | NA | frameshift | c.2546_2547delCT | p.Pro849fs |
| C | | | | |
| 2:25235757:AG:A | rs750600685 | frameshift | c.2546delC | p.Pro849fs |
| 2:25235758:G:A | NA | missense | c.2546C > T | p.Pro849Leu |
| 2:25235758:G:C | NA | missense | c.2546C > G | p.Pro849Arg |
| 2:25235758:G:GG | NA | frameshift | c.2544_2545dupTC | p.Pro849fs |
| A | | | | |
| 2:25235758:G:T | NA | missense | c.2546C > A | p.Pro849His |
| 2:25235759:G:A | NA | missense | c.2545C > T | p.Pro849Ser |
| 2:25235759:G:C | NA | missense | c.2545C > G | p.Pro849Ala |
| 2:25235759:G:GA | NA | frameshift | c.2544dupT | p.Pro849fs |
| 2:25235759:G:T | NA | missense | c.2545C > A | p.Pro849Thr |
| 2:25235759:GA:G | NA | frameshift | c.2544delT | p.Pro849fs |
| 2:25235762:A:C | NA | missense | c.2542T > G | p.Phe848Val |
| 2:25235762:A:T | NA | missense | c.2542T > A | p.Phe848Ile |
| 2:25235763:AT:A | NA | frameshift | c.2540delA | p.His847fs |
| 2:25235764:TG:T | NA | frameshift | c.2539delC | p.His847fs |
| 2:25235764:TGC: | NA | frameshift | c.2538_2539delGC | p.His847fs |
| T | | | | |
| 2:25235764:TGCT | NA | frameshift | c.2535_2539delCC | p.Asp845fs |
| GG:T | | | AGC | |
| 2:25235765:G:T | NA | missense | c.2539C > A | p.His847Asn |
| 2:25235765:GC:G | NA | frameshift | c.2538delG | p.Gln846fs |
| 2:25235766:CT:C | NA | frameshift | c.2537delA | p.Gln846fs |
| 2:25235766:CTG: | NA | frameshift | c.2536_2537delCA | p.Gln846fs |
| C | | | | |
| 2:25235767:TG:T | NA | frameshift | c.2536delC | p.Gln846fs |
| 2:25235768:G:A | rs781139634 | stop_gained | c.2536C > T | p.Gln846* |
| 2:25235769:G:C | NA | missense | c.2535C > G | p.Asp845Glu |
| 2:25235770:TC:T | NA | frameshift | c.2533delG | p.Asp845fs |
| 2:25235771:CTT:C | NA | frameshift | c.2531_2532delAA | p.Lys844fs |
| 2:25235771:CTTT | NA | frameshift | c.2520_2532delAA | p.Ile840fs |
| GCCCTGCTTT:C | | | AGCAGGGCAAA | |
| 2:25235774:T:C | NA | missense | c.2530A > G | p.Lys844Glu |
| 2:25235774:TG:T | NA | frameshift | c.2529delC | p.Asp845fs |
| 2:25235775:GC:G | NA | frameshift | c.2528delG | p.Gly843fs |
| 2:25235776:C:CC | NA | frameshift | c.2524_2527dupCA | p.Gly843fs |
| CTG | | | GG | |
| 2:25235776:C:T | NA | missense | c.2528G > A | p.Gly843Asp |
| 2:25235777:C:G | NA | missense | c.2527G > C | p.Gly843Arg |
| 2:25235778:C:G | NA | missense | c.2526G > C | p.Gln842His |
| 2:25235778:CT:C | NA | frameshift | c.2525delA | p.Gln842fs |
| 2:25235779:T:C | rs771174392 | missense | c.2525A > G | p.Gln842Arg |
| 2:25235779:TG:T | NA | frameshift | c.2524delC | p.Gln842fs |
| 2:25235779:TGCT | NA | frameshift | c.2517_2524delCA | p.Ile840fs |
| TTATG:T | | | TAAAGC | |
| 2:25235780:G:A | rs1015295548 | stop_gained | c.2524C > T | p.Gln842* |
| 2:25235780:G:C | NA | missense | c.2524C > G | p.Gln842Glu |
| 2:25235780:GC:G | NA | frameshift | c.2523delG | p.Lys841fs |
| 2:25235781:C:CTT | NA | frameshift | c.2512_2522dupAA | p.Gln842fs |
| TATGGAGTT | | | CTCCATAAA | |
| 2:25235781:CT:C | NA | frameshift | c.2522delA | p.Lys841fs |
| 2:25235781:CTT:C | NA | frameshift | c.2521_2522delAA | p.Lys841fs |
| 2:25235783:T:C | rs1404111595 | missense | c.2521A > G | p.Lys841Glu |
| 2:25235783:T:G | NA | missense | c.2521A > C | p.Lys841Gln |
| 2:25235783:TTA:T | NA | frameshift | c.2519_2520delTA | p.Ile840fs |
| 2:25235784:TA:T | NA | frameshift | c.2519delT | p.Ile840fs |
| 2:25235786:T:C | NA | missense | c.2518A > G | p.Ile840Val |
| 2:25235786:T:TG | NA | frameshift | c.2517dupC | p.Ile840fs |
| 2:25235786:T:TG | NA | frameshift | c.2516_2517dupCC | p.Ile840fs |
| G | | | | |
| 2:25235786:TG:T | NA | frameshift | c.2517delC | p.Ile840fs |
| 2:25235787:G:GA | NA | frameshift | c.2516_2517insT | p.Ile840fs |
| 2:25235788:G:A | NA | missense | c.2516C > T | p.Ser839Phe |
| 2:25235788:GA:G | NA | frameshift | c.2515delT | p.Ser839fs |
| 2:25235789:A:C | NA | missense | c.2515T > G | p.Ser839Ala |
| 2:25235789:AG:A | NA | frameshift | c.2514delC | p.Ser839fs |
| 2:25235790:G:GT | rs781008582 | frameshift | c.2513dupA | p.Asn838fs |
| 2:25235790:GT:G | NA | frameshift | c.2513delA | p.Asn838fs |
| 2:25235792:T:C | rs961377711 | missense | c.2512A > G | p.Asn838Asp |
| 2:25235794:G:C | rs1374267987 | stop_gained | c.2510C > G | p.Ser837* |
| 2:25235794:G:GA | NA | frameshift | c.2509_2510insTG | p.Ser837fs |
| TCA | | | AT | |
| 2:25235794:G:T | NA | stop_gained | c.2510C > A | p.Ser837* |
| 2:25235795:A:AC | NA | frameshift | c.2508dupG | p.Ser837fs |
| 2:25235797:C:G | NA | missense | c.2507G > C | p.Arg836Thr |
| 2:25235800:G:A | rs1489843853 | missense | c.2504C > T | p.Thr835Met |
| 2:25235800:GT:G | rs1293842202 | frameshift | c.2503delA | p.Thr835fs |
| 2:25235801:T:A | NA | missense | c.2503A > T | p.Thr835Ser |
| 2:25235803:G:A | NA | missense | c.2501C > T | p.Thr834Ile |
| 2:25235803:G:GT | NA | frameshift | c.2500dupA | p.Thr834fs |
| 2:25235804:T:C | NA | missense | c.2500A > G | p.Thr834Ala |
| 2:25235804:T:TA | NA | frameshift | c.2481_2499dupCA | p.Thr834fs |
| ATGGTCCTCACTT | | | GCAAAGTGAGGAC | |
| TGCTG | | | CATT | |
| 2:25235804:TA:T | NA | frameshift | c.2499delT | p.Thr834fs |
| 2:25235806:A:T | NA | missense | c.2498T > A | p.Ile833Asn |
| 2:25235807:T:C | rs745931882 | missense | c.2497A > G | p.Ile833Val |
| 2:25235809:GT:G | NA | frameshift | c.2494delA | p.Thr832fs |
| 2:25235812:C:T | NA | missense | c.2492G > A | p.Arg831Lys |
| 2:25235820:GCTG | NA | frameshift | c.2479- | p.Phe827fs |
| AACTAGATGAAGA: | | | 11_2483delTCTTCA | |
| G | | | TCTAGTTCAG | |
| 2:25235821:CTGA | NA | frameshift | c.2479- | p.Phe827fs |
| ACT:C | | | 2_2482delAGTTCA | |
| 2:25235822:T:TG | NA | stop_gained | c.2481_2482insCTC | p.Phe827_Ser828i |
| AACTAGAG | | | TAGTTC | nsLeuTerPhe |
| 2:25235822:TG:T | rs769831202 | frameshift | c.2481delC | p.Phe827fs |
| 2:25235823:G:GT | NA | frameshift | c.2480_2481insA | p.Phe827fs |
| 2:25235823:G:T | NA | missense | c.2481C > A | p.Phe827Leu |
| 2:25235823:GA:G | NA | frameshift | c.2480delT | p.Phe827fs |
| 2:25235823:GAA: | NA | frameshift | c.2479_2480delTT | p.Phe827fs |
| G | | | | |
| 2:25235825:A:C | NA | missense | c.2479T > G | p.Phe827Val |
| 2:25235826:C:A | NA | splice_acceptor | c.2479-1G > T | |
| 2:25235826:C:G | NA | splice_acceptor | c.2479-1G > C | |
| 2:25235826:C:T | rs775933506 | splice_acceptor | c.2479-1G > A | |
| 2:25235826:CT:C | NA | splice_acceptor | c.2479-2delA | |
| 2:25235827:T:C | rs761171028 | splice_acceptor | c.2479-2A > G | |
| 2:25235827:T:G | NA | splice_acceptor | c.2479-2A > C | |
| 2:25236934:A:AC | NA | splice_donor | c.2478+1dupG | |
| 2:25236934:A:C | rs1327946633 | splice_donor | c.2478+2T > G | |
| 2:25236934:A:G | NA | splice_donor | c.2478+2T > C | |
| 2:25236934:A:T | NA | splice_donor | c.2478+2T > A | |
| 2:25236934:AC:A | NA | splice_donor | c.2478+1delG | |
| 2:25236935:C:A | NA | splice_donor | c.2478+1G > T | |
| 2:25236935:C:G | NA | splice_donor | c.2478+1G > C | |
| 2:25236935:C:T | rs762213449 | splice_donor | c.2478+1G > A | |
| 2:25236935:CCT: | NA | frameshift | c.2477_2478delAG | p.Lys826fs |
| C | | | | |
| 2:25236936:C:G | NA | missense | c.2478G > C | p.Lys826Asn |
| 2:25236936:CT:C | NA | frameshift | c.2477delA | p.Lys826fs |
| 2:25236936:CTTG: | NA | inframe_indel | c.2475_2477delCA | p.Lys826del |
| C | | | A | |
| 2:25236937:T:A | NA | missense | c.2477A > T | p.Lys826Met |
| 2:25236937:T:C | rs770079872 | missense | c.2477A > G | p.Lys826Arg |
| 2:25236937:T:G | rs770079872 | missense | c.2477A > C | p.Lys826Thr |
| 2:25236938:T:C | NA | missense | c.2476A > G | p.Lys826Glu |
| 2:25236939:GGCT | NA | frameshift | c.2468_2474delGG | p.Arg823fs |
| ATCC:G | | | ATAGC | |
| 2:25236940:G:T | NA | missense | c.2474C > A | p.Ala825Asp |
| 2:25236941:C:T | NA | missense | c.2473G > A | p.Ala825Thr |
| 2:25236942:TA:T | NA | frameshift | c.2471delT | p.Ile824fs |
| 2:25236943:A:G | NA | missense | c.2471T > C | p.Ile824Thr |
| 2:25236943:AT:A | NA | frameshift | c.2470delA | p.Ile824fs |
| 2:25236944:T:TC | rs1200243711 | frameshift | c.2469dupG | p.Ile824fs |
| 2:25236944:TC:T | NA | frameshift | c.2469delG | p.Ile824fs |
| 2:25236946:C:T | NA | missense | c.2468G > A | p.Arg823Lys |
| 2:25236946:CT:C | NA | frameshift | c.2467delA | p.Arg823fs |
| 2:25236947:T:C | NA | missense | c.2467A > G | p.Arg823Gly |
| 2:25236948:G:GC | NA | frameshift | c.2465dupG | p.Arg823fs |
| 2:25236948:GC:G | NA | frameshift | c.2465delG | p.Gly822fs |
| 2:25236950:CA:C | NA | frameshift | c.2463delT | p.His821fs |
| 2:25236951:A:C | NA | missense | c.2463T > G | p.His821Gln |
| 2:25236951:A:T | NA | missense | c.2463T > A | p.His821Gln |
| 2:25236951:AT:A | NA | frameshift | c.2462delA | p.His821fs |
| 2:25236952:T:A | NA | missense | c.2462A > T | p.His821Leu |
| 2:25236952:T:C | NA | missense | c.2462A > G | p.His821Arg |
| 2:25236952:T:G | rs772882388 | missense | c.2462A > C | p.His821Pro |
| 2:25236952:TG:T | NA | frameshift | c.2461delC | p.His821fs |
| 2:25236955:T:A | NA | missense | c.2459A > T | p.Glu820Val |
| 2:25236955:T:C | NA | missense | c.2459A > G | p.Glu820Gly |
| 2:25236955:TC:T | NA | frameshift | c.2458delG | p.Glu820fs |
| 2:25236955:TCCA | NA | frameshift | c.2455_2458delCT | p.Leu819fs |
| G:T | | | GG | |
| 2:25236956:C:A | rs1264543822 | stop_gained | c.2458G > T | p.Glu820* |
| 2:25236956:C:G | NA | missense | c.2458G > C | p.Glu820Gln |
| 2:25236956:CCA: | NA | frameshift | c.2456_2457delTG | p.Leu819fs |
| C | | | | |
| 2:25236956:CCAG | NA | frameshift | c.2454_2457delTCT | p.Cys818fs |
| A:C | | | G | |
| 2:25236957:CA:C | NA | frameshift | c.2456delT | p.Leu819fs |
| 2:25236958:A:T | NA | missense | c.2456T > A | p.Leu819Gln |
| 2:25236958:AG:A | NA | frameshift | c.2455delC | p.Leu819fs |
| 2:25236959:G:C | NA | missense | c.2455C > G | p.Leu819Val |
| 2:25236959:G:T | NA | missense | c.2455C > A | p.Leu819Met |
| 2:25236960:A:AC | NA | frameshift | c.2450_2453dupA | p.Cys818fs |
| ACT | | | GTG | |
| 2:25236960:A:AC | NA | frameshift | c.2453_2454insGG | p.Cys818fs |
| C | | | | |
| 2:25236960:A:T | NA | stop_gained | c.2454T > A | p.Cys818* |
| 2:25236960:AC:A | NA | frameshift | c.2453delG | p.Cys818fs |
| 2:25236961:C:A | NA | missense | c.2453G > T | p.Cys818Phe |
| 2:25236961:C:T | NA | missense | c.2453G > A | p.Cys818Tyr |
| 2:25236961:CA:C | NA | frameshift | c.2452delT | p.Cys818fs |
| 2:25236962:A:C | NA | missense | c.2452T > G | p.Cys818Gly |
| 2:25236962:A:G | NA | missense | c.2452T > C | p.Cys818Arg |
| 2:25236962:A:T | NA | missense | c.2452T > A | p.Cys818Ser |
| 2:25236963:C:CT | NA | frameshift | c.2450dupA | p.Cys818fs |
| 2:25236963:CT:C | NA | frameshift | c.2450delA | p.Glu817fs |
| 2:25236964:T:C | NA | missense | c.2450A > G | p.Glu817Gly |
| 2:25236964:TC:T | NA | frameshift | c.2449delG | p.Glu817fs |
| 2:25236965:C:A | rs373873045 | stop_gained | c.2449G > T | p.Glu817* |
| 2:25236966:C:CT | NA | frameshift | c.2444_2447dupTG | p.Gln816fs |
| GCA | | | CA | |
| 2:25236966:CT:C | NA | frameshift | c.2447delA | p.Gln816fs |
| 2:25236967:T:C | NA | missense | c.2447A > G | p.Gln816Arg |
| 2:25236967:TG:T | NA | frameshift | c.2446delC | p.Gln816fs |
| 2:25236968:G:A | rs759187608 | stop_gained | c.2446C > T | p.Gln816* |
| 2:25236969:C:CA | NA | frameshift | c.2444dupT | p.Gln816fs |
| 2:25236969:CA:C | NA | frameshift | c.2444delT | p.Leu815fs |
| 2:25236970:A:G | NA | missense | c.2444T > C | p.Leu815Pro |
| 2:25236970:A:T | NA | missense | c.2444T > A | p.Leu815Gln |
| 2:25236970:AG:A | NA | frameshift | c.2443delC | p.Leu815fs |
| 2:25236971:G:C | NA | missense | c.2443C > G | p.Leu815Val |
| 2:25236971:G:T | NA | missense | c.2443C > A | p.Leu815Met |
| 2:25236972:CT:C | NA | frameshift | c.2441delA | p.Glu814fs |
| 2:25236972:CTCC | NA | frameshift | c.2435_2441delAG | p.Lys812fs |
| AGCT:C | | | CTGGA | |
| 2:25236973:T:C | NA | missense | c.2441A > G | p.Glu814Gly |
| 2:25236973:T:TC | NA | frameshift | c.2440dupG | p.Glu814fs |
| 2:25236974:C:A | rs1174921909 | stop_gained | c.2440G > T | p.Glu814* |
| 2:25236975:CA:C | NA | frameshift | c.2438delT | p.Leu813fs |
| 2:25236977:G:GC | NA | frameshift | c.2430_2436dupTG | p.Leu813fs |
| TTATCA | | | ATAAG | |
| 2:25236977:GC:G | NA | frameshift | c.2436delG | p.Lys812fs |
| 2:25236977:GCTT | NA | frameshift | c.2432_2436delAT | p.Asp811fs |
| AT:G | | | AAG | |
| 2:25236978:CT:C | NA | frameshift | c.2435delA | p.Lys812fs |
| 2:25236979:T:C | NA | missense | c.2435A > G | p.Lys812Arg |
| 2:25236979:T:TTA | NA | frameshift | c.2433_2434dupTA | p.Lys812fs |
| 2:25236980:T:A | NA | stop_gained | c.2434A > T | p.Lys812* |
| 2:25236980:T:TA | rs1287022880 | frameshift | c.2433dupT | p.Lys812fs |
| 2:25236980:TATC | NA | frameshift | c.2420_2433delCC | p.Ser807fs |
| ATTCACAGTGG:T | | | ACTGTGAATGAT | |
| 2:25236981:A:AT | NA | frameshift | c.2429_2432dupAT | p.Asp811fs |
| CAT | | | GA | |
| 2:25236981:A:T | NA | missense | c.2433T > A | p.Asp811Glu |
| 2:25236981:ATC: | NA | frameshift | c.2431_2432delGA | p.Asp811fs |
| A | | | | |
| 2:25236981:ATCA | NA | frameshift | c.2428_2432delAA | p.Asn810fs |
| TT:A | | | TGA | |
| 2:25236983:CA:C | NA | frameshift | c.2430delT | p.Asn810fs |
| 2:25236984:AT:A | NA | frameshift | c.2429delA | p.Asn810fs |
| 2:25236986:TCA: | NA | frameshift | c.2426_2427delTG | p.Va1809fs |
| T | | | | |
| 2:25236989:CA:C | NA | frameshift | c.2424delT | p.Va1809fs |
| 2:25236990:AG:A | NA | frameshift | c.2423delC | p.Thr808fs |
| 2:25236991:GTG | NA | frameshift | c.2419_2422delTC | p.Ser807fs |
| GA:G | | | CA | |
| 2:25236991:GTG | NA | frameshift | c.2409- | p.Arg803fs |
| GATGCCAACGGCC: | | | 1_2422delGGCCGT | |
| G | | | TGGCATCCA | |
| 2:25236994:G:GA | NA | frameshift | c.2416_2419dupGC | p.Ser807fs |
| TGC | | | AT | |
| 2:25236994:G:T | NA | missense | c.2420C > A | p.Ser807Tyr |
| 2:25236997:GC:G | NA | frameshift | c.2416delG | p.Ala806fs |
| 2:25236998:C:T | NA | missense | c.2416G > A | p.Ala806Thr |
| 2:25236999:C:CA | NA | frameshift | c.2414dupT | p.Leu805fs |
| 2:25236999:C:CT | NA | frameshift | c.2414_2415insA | p.Ala806fs |
| 2:25236999:CA:C | NA | frameshift | c.2414delT | p.Leu805fs |
| 2:25237000:A:AA | NA | frameshift | c.2413_2414insATT | p.Leu805fs |
| AAT | | | T | |
| 2:25237000:A:T | NA | stop_gained | c.2414T > A | p.Leu805* |
| 2:25237002:CG:C | NA | frameshift | c.2411delC | p.Pro804fs |
| 2:25237002:CGG | NA | splice_accepto | c.2409- | p.Pro804del |
| CCTAGGAGGCAG | | r | 15_2411delTCTTCT | |
| AAGA:C | | | GCCTCCTAGGCC | |
| 2:25237003:G:A | rs750597155 | missense | c.2411C > T | p.Pro804Leu |
| 2:25237003:G:T | NA | missense | c.2411C > A | p.Pro804Gln |
| 2:25237003:GGC: | NA | frameshift | c.2409_2410delGC | p.Arg803fs |
| G | | | | |
| 2:25237004:G:A | NA | missense | c.2410C > T | p.Pro804Ser |
| 2:25237004:GC:G | rs35824014 | frameshift | c.2409delG | p.Arg803fs |
| 2:25237005:C:A | rs1304201075 | missense | c.2409G > T | p.Arg803Ser |
| 2:25237005:C:G | NA | missense | c.2409G > C | p.Arg803Ser |
| 2:25237006:C:A | rs866917013 | splice_acceptor | c.2409-1G > T | |
| 2:25237006:C:G | rs866917013 | splice_acceptor | c.2409-1G > C | |
| 2:25237006:C:T | rs866917013 | splice_acceptor | c.2409-1G > A | |
| 2:25237007:T:A | NA | splice_acceptor | c.2409-2A > T | |
| 2:25237007:T:C | NA | splice_acceptor | c.2409-2A > G | |
| 2:25237007:T:G | NA | splice_acceptor | c.2409-2A > C | |
| 2:25239128:A:C | NA | splice_donor | c.2408+2T > G | |
| 2:25239128:A:G | NA | splice_donor | c.2408+2T > C | |
| 2:25239128:A:T | NA | splice_donor | c.2408+2T > A | |
| 2:25239129:C:A | NA | splice_donor | c.2408+1G > T | |
| 2:25239129:C:G | NA | splice_donor | c.2408+1G > C | |
| 2:25239129:C:T | rs1457044151 | splice_donor | c.2408+1G > A | |
| 2:25239130:C:A | NA | missense | c.2408G > T | p.Arg803Met |
| 2:25239130:C:G | NA | missense | c.2408G > C | p.Arg803Thr |
| 2:25239130:C:T | rs764146514 | missense | c.2408G > A | p.Arg803Lys |
| 2:25239131:T:A | NA | missense | c.2407A > T | p.Arg803Trp |
| 2:25239131:T:C | NA | missense | c.2407A > G | p.Arg803Gly |
| 2:25239131:TG:T | NA | frameshift | c.2406delC | p.Asn802fs |
| 2:25239131:TGTT | NA | frameshift | c.2393_2406delTTC | p.Leu798fs |
| CATACCGGGAA:T | | | CCGGTATGAAC | |
| 2:25239132:G:GA | NA | frameshift | c.2405_2406insT | p.Arg803fs |
| 2:25239132:GT:G | NA | frameshift | c.2405delA | p.Asn802fs |
| 2:25239135:C:A | NA | missense | c.2403G > T | p.Met801Ile |
| 2:25239135:C:T | NA | missense | c.2403G > A | p.Met801Ile |
| 2:25239136:A:C | rs901395842 | missense | c.2402T > G | p.Met801Arg |
| 2:25239136:A:G | NA | missense | c.2402T > C | p.Met801Thr |
| 2:25239136:A:T | NA | missense | c.2402T > A | p.Met801Lys |
| 2:25239136:AT:A | NA | frameshift | c.2401delA | p.Met801fs |
| 2:25239136:ATAC | NA | frameshift | c.2391_2401delCC | p.Leu798fs |
| CGGGAAGG:A | | | TTCCCGGTA | |
| 2:25239137:T:A | NA | missense | c.2401A > T | p.Met801Leu |
| 2:25239137:T:C | rs753567076 | missense | c.2401A > G | p.Met801Val |
| 2:25239138:AC:A | NA | frameshift | c.2399delG | p.Gly800fs |
| 2:25239139:C:A | NA | missense | c.2399G > T | p.Gly800Val |
| 2:25239139:C:T | NA | missense | c.2399G > A | p.Gly800Asp |
| 2:25239140:C:CG | NA | frameshift | c.2397dupC | p.Gly800fs |
| 2:25239140:C:T | rs757083492 | missense | c.2398G > A | p.Gly800Ser |
| 2:25239140:CG:C | rs998597777 | frameshift | c.2397delC | p.Gly800fs |
| 2:25239142:G:A | rs1004794515 | missense | c.2396C > T | p.Pro799Leu |
| 2:25239142:G:C | rs1004794515 | missense | c.2396C > G | p.Pro799Arg |
| 2:25239143:G:A | rs766564570 | missense | c.2395C > T | p.Pro799Ser |
| 2:25239143:G:C | rs766564570 | missense | c.2395C > G | p.Pro799Ala |
| 2:25239143:G:T | rs766564570 | missense | c.2395C > A | p.Pro799Thr |
| 2:25239144:AAG | NA | frameshift | c.2390_2393delAC | p.Asn797fs |
| GT:A | | | CT | |
| 2:25239144:AAG | NA | frameshift | c.2384_2393delGG | p.Trp795fs |
| GTTACCCC:A | | | GGTAACCT | |
| 2:25239144:AAG | NA | inframe_indel | c.2382_2393delCT | p.Trp795_Leu798 |
| GTTACCCCAG:A | | | GGGGTAACCT | del |
| 2:25239145:A:C | NA | missense | c.2393T > G | p.Leu798Arg |
| 2:25239145:A:G | rs1399762821 | missense | c.2393T > C | p.Leu798Pro |
| 2:25239145:A:T | NA | missense | c.2393T > A | p.Leu798His |
| 2:25239145:AG:A | NA | frameshift | c.2392delC | p.Leu798fs |
| 2:25239145:AGG | NA | frameshift | c.2385_2392delGG | p.Trp795fs |
| TTACCC:A | | | GTAACC | |
| 2:25239146:G:A | NA | missense | c.2392C > T | p.Leu798Phe |
| 2:25239146:G:C | NA | missense | c.2392C > G | p.Leu798Val |
| 2:25239146:G:GG | NA | frameshift | c.2391_2392insTTA | p.Gly800fs |
| TAA | | | C | |
| 2:25239146:G:GG | NA | frameshift | c.2391_2392insGTT | p.Leu798fs |
| TAAC | | | AC | |
| 2:25239147:G:C | NA | missense | c.2391C > G | p.Asn797Lys |
| 2:25239147:G:GC | NA | frameshift | c.2390_2391insG | p.Asn797fs |
| 2:25239147:G:T | | missense | c.2391C > A | p.Asn797Lys |
| 2:25239147:GT:G | rs748836168 | frameshift | c.2390delA | p.Asn797fs |
| 2:25239148:T:A | NA | missense | c.2390A > T | p.Asn797Ile |
| 2:25239148:T:C | rs767588813 | missense | c.2390A > G | p.Asn797Ser |
| 2:25239148:T:G | NA | missense | c.2390A > C | p.Asn797Thr |
| 2:25239148:TTAC | NA | frameshift | c.2383_2389delTG | p.Trp795fs |
| CCCA:T | | | GGGTA | |
| 2:25239149:T:A | NA | missense | c.2389A > T | p.Asn797Tyr |
| 2:25239149:T:C | rs755013083 | missense | c.2389A > G | p.Asn797Asp |
| 2:25239149:T:G | rs755013083 | missense | c.2389A > C | p.Asn797His |
| 2:25239149:TACC | NA | frameshift | c.2381_2388delTCT | p.Phe794fs |
| CCAGA:T | | | GGGGT | |
| 2:25239150:A:AC | NA | frameshift | c.2386_2387dupG | p.Asn797fs |
| C | | | G | |
| 2:25239150:AC:A | rs1025684646 | frameshift | c.2387delG | p.Gly796fs |
| 2:25239150:ACCC | NA | inframe_indel | c.2382_2387delCT | p.Trp795_Gly796 |
| CAG:A | | | GGGG | del |
| 2:25239151:C:A | rs781138077 | missense | c.2387G > T | p.Gly796Val |
| 2:25239151:C:G | NA | missense | c.2387G > C | p.Gly796Ala |
| 2:25239151:C:T | rs781138077 | missense | c.2387G > A | p.Gly796Asp |
| 2:25239152:C:A | NA | missense | c.2386G > T | p.Gly796Cys |
| 2:25239152:C:G | NA | missense | c.2386G > C | p.Gly796Arg |
| 2:25239153:C:A | NA | missense | c.2385G > T | p.Trp795Cys |
| 2:25239153:C:G | NA | missense | c.2385G > C | p.Trp795Cys |
| 2:25239153:C:T | rs1395575712 | stop_gained | c.2385G > A | p.Trp795* |
| 2:25239154:C:A | rs756566100 | missense | c.2384G > T | p.Trp795Leu |
| 2:25239154:C:G | NA | missense | c.2384G > C | p.Trp795Ser |
| 2:25239154:C:T | rs756566100 | stop_gained | c.2384G > A | p.Trp795* |
| 2:25239154:CA:C | NA | frameshift | c.2383delT | p.Trp795fs |
| 2:25239154:CAG: | NA | frameshift | c.2382_2383delCT | p.Phe794fs |
| C | | | | |
| 2:25239154:CAG | NA | inframe_indel | c.2381_2383delTCT | p.Phe794del |
| A:C | | | | |
| 2:25239155:A:G | rs778414705 | missense | c.2383T > C | p.Trp795Arg |
| 2:25239155:A:T | | missense | c.2383T > A | p.Trp795Arg |
| 2:25239156:G:C | NA | missense | c.2382C > G | p.Phe794Leu |
| 2:25239157:A:C | NA | missense | c.2381T > G | p.Phe794Cys |
| 2:25239157:A:G | rs1419173604 | missense | c.2381T > C | p.Phe794Ser |
| 2:25239158:A:C | | missense | c.2380T > G | p.Phe794Val |
| 2:25239158:A:G | rs771474959 | missense | c.2380T > C | p.Phe794Leu |
| 2:25239158:A:T | NA | missense | c.2380T > A | p.Phe794Ile |
| 2:25239159:G:C | rs1418024882 | stop_gained | c.2379C > G | p.Tyr793* |
| 2:25239159:G:T | NA | stop_gained | c.2379C > A | p.Tyr793* |
| 2:25239160:T:G | NA | missense | c.2378A > C | p.Tyr793Ser |
| 2:25239161:A:C | rs1247759759 | missense | c.2377T > G | p.Tyr793Asp |
| 2:25239161:A:G | NA | missense | c.2377T > C | p.Tyr793His |
| 2:25239163:C:G | NA | missense | c.2375G > C | p.Arg792Pro |
| 2:25239163:C:T | rs774100557 | missense | c.2375G > A | p.Arg792His |
| 2:25239163:CG:C | NA | frameshift | c.2374delC | p.Arg792fs |
| 2:25239164:G:A | NA | missense | c.2374C > T | p.Arg792Cys |
| 2:25239164:G:C | NA | missense | c.2374C > G | p.Arg792Gly |
| 2:25239164:G:GG | NA | frameshift | c.2366_2373dupAC | p.Arg792fs |
| GCCCTGT | | | AGGGCC | |
| 2:25239164:GGG | NA | frameshift | c.2364_2373delAC | p.His789fs |
| CCCTGTGT:G | | | ACAGGGCC | |
| 2:25239166:G:A | NA | missense | c.2372C > T | p.Ala791Val |
| 2:25239166:G:T | NA | missense | c.2372C > A | p.Ala791Asp |
| 2:25239166:GCG | NA | frameshift | c.2371delG | p.Ala791fs |
| 2:25239167:C:T | rs1005623505 | missense | c.2371G > A | p.Ala791Thr |
| 2:25239167:CCCT | NA | frameshift | c.2366_2370delAC | p.His789fs |
| GT:C | | | AGG | |
| 2:25239168:C:G | NA | missense | c.2370G > C | p.Arg790Ser |
| 2:25239169:CT:C | NA | frameshift | c.2368delA | p.Arg790fs |
| 2:25239169:CTG: | NA | frameshift | c.2367_2368delCA | p.His789fs |
| C | | | | |
| 2:25239170:T:A | NA | missense | c.2368A > T | p.Arg790Trp |
| 2:25239171:G:T | NA | missense | c.2367C > A | p.His789Gln |
| 2:25239172:T:A | NA | missense | c.2366A > T | p.His789Leu |
| 2:25239173:GT:G | NA | frameshift | c.2364delA | p.His789fs |
| 2:25239175:G:A | rs1277979168 | missense | c.2363C > T | p.Ala788Val |
| 2:25239175:GCA | NA | frameshift | c.2358_2362delAG | p.Ala787fs |
| GCT:G | | | CTG | |
| 2:25239176:C:T | NA | missense | c.2362G > A | p.Ala788Thr |
| 2:25239176:CA:C | NA | frameshift | c.2361delT | p.Ala788fs |
| 2:25239177:AGC: | NA | frameshift | c.2359_2360delGC | p.Ala787fs |
| A | | | | |
| 2:25239178:G:GC | NA | frameshift | c.2359dupG | p.Ala787fs |
| 2:25239178:GCT: | NA | frameshift | c.2358_2359delAG | p.Ala787fs |
| G | | | | |
| 2:25239179:C:A | rs375845138 | missense | c.2359G > T | p.Ala787Ser |
| 2:25239179:C:CT | NA | frameshift | c.2358dupA | p.Ala787fs |
| 2:25239179:C:T | NA | missense | c.2359G > A | p.Ala787Thr |
| 2:25239181:G:A | NA | missense | c.2357C > T | p.Ser786Leu |
| 2:25239181:G:C | rs962973415 | stop_gained | c.2357C > G | p.Ser786* |
| 2:25239181:G:T | NA | stop_gained | c.2357C > A | p.Ser786* |
| 2:25239181:GAC: | NA | frameshift | c.2355_2356delGT | p.Ala787fs |
| G | | | | |
| 2:25239185:C:T | NA | missense | c.2353G > A | p.Va1785Met |
| 2:25239186:TTC:T | NA | frameshift | c.2350_2351delGA | p.Glu784fs |
| 2:25239187:T:TC | NA | frameshift | c.2350_2351insTTT | p.Glu784fs |
| AAA | | | G | |
| 2:25239187:T:TCT | NA | frameshift | c.2323_2350dupTC | p.Glu784fs |
| TTGGCATCAATCA | | | CAACCCTGTGATGA | |
| TCACAGGGTTGG | | | TTGATGCCAAAG | |
| A | | | | |
| 2:25239187:TC:T | NA | frameshift | c.2350delG | p.Glu784fs |
| 2:25239188:C:A | NA | stop_gained | c.2350G > T | p.Glu784* |
| 2:25239188:C:CT | NA | frameshift | c.2349dupA | p.Glu784fs |
| 2:25239188:CT:C | rs1255237375 | frameshift | c.2349delA | p.Glu784fs |
| 2:25239191:T:TG | NA | frameshift | c.2346dupC | p.Lys783fs |
| 2:25239191:TG:T | NA | frameshift | c.2346delC | p.Glu784fs |
| 2:25239193:G:A | NA | missense | c.2345C > T | p.Ala782Val |
| 2:25239194:C:CA | NA | frameshift | c.2340_2343dupTG | p.Ala782fs |
| TCA | | | AT | |
| 2:25239194:C:T | NA | missense | c.2344G > A | p.Ala782Thr |
| 2:25239194:CATC | NA | frameshift | c.2340_2343delTG | p.Ile780fs |
| A:C | | | AT | |
| 2:25239195:AT:A | NA | frameshift | c.2342delA | p.Asp781fs |
| 2:25239197:CA:C | NA | frameshift | c.2340delT | p.Ile780fs |
| 2:25239198:A:C | NA | missense | c.2340T > G | p.Ile780Met |
| 2:25239198:AATC | NA | inframe_indel | c.2334_2339delGA | p.Met779_Ile780 |
| ATC:A | | | TGAT | del |
| 2:25239198:AATC | NA | frameshift | c.2330_2339delCT | p.Pro777fs |
| ATCACAG:A | | | GTGATGAT | |
| 2:25239199:A:C | rs370751539 | missense | c.2339T > G | p.Ile780Ser |
| 2:25239199:A:G | rs370751539 | missense | c.2339T > C | p.Ile780Thr |
| 2:25239199:A:T | rs370751539 | missense | c.2339T > A | p.Ile780Asn |
| 2:25239201:C:CA | NA | frameshift | c.2333_2336dupTG | p.Met779fs |
| TCA | | | AT | |
| 2:25239201:CA:C | NA | frameshift | c.2336delT | p.Met779fs |
| 2:25239202:A:G | NA | missense | c.2336T > C | p.Met779Thr |
| 2:25239202:AT:A | NA | frameshift | c.2335delA | p.Met779fs |
| 2:25239203:TCAC | NA | splice_accepto | c.2323- | p.Ser775_Met779 |
| AGGGTTGGACTA | | r | 11_2334delCTGTTT | del |
| CAAAACAG:T | | | TGTAGTCCAACCCT | |
| | | | GTG | |
| 2:25239204:C:CA | NA | frameshift | c.2333dupT | p.Met779fs |
| 2:25239204:CA:C | NA | frameshift | c.2333delT | p.Va1778fs |
| 2:25239204:CACA | NA | frameshift | c.2323- | p.Ser775fs |
| GGGTTGGACTAC | | | 6_2333delTTGTAG | |
| AA:C | | | TCCAACCCTGT | |
| 2:25239204:CACA | NA | frameshift | c.2323- | p.Ser775fs |
| GGGTTGGACTAC | | | 7_2333delTTTGTA | |
| AAA:C | | | GTCCAACCCTGT | |
| 2:25239205:A:C | rs979932565 | missense | c.2333T > G | p.Va1778Gly |
| 2:25239205:A:G | NA | missense | c.2333T > C | p.Va1778Ala |
| 2:25239205:A:T | NA | missense | c.2333T > A | p.Va1778Glu |
| 2:25239205:AC:A | NA | frameshift | c.2332delG | p.Va1778fs |
| 2:25239206:C:A | NA | missense | c.2332G > T | p.Va1778Leu |
| 2:25239206:C:T | NA | missense | c.2332G > A | p.Va1778Met |
| 2:25239207:AG:A | rs775989176 | frameshift | c.2330delC | p.Pro777fs |
| 2:25239208:G:A | rs752626029 | missense | c.2330C > T | p.Pro777Leu |
| 2:25239208:G:C | rs752626029 | missense | c.2330C > G | p.Pro777Arg |
| 2:25239208:G:T | rs752626029 | missense | c.2330C > A | p.Pro777His |
| 2:25239209:G:A | rs1172777420 | missense | c.2329C > T | p.Pro777Ser |
| 2:25239210:GT:G | NA | frameshift | c.2327delA | p.Asn776fs |
| 2:25239212:T:TG | NA | frameshift | c.2325dupC | p.Asn776fs |
| 2:25239212:TG:T | NA | frameshift | c.2325delC | p.Asn776fs |
| 2:25239214:G:A | NA | missense | c.2324C > T | p.Ser775Phe |
| 2:25239214:GA:G | NA | frameshift | c.2323delT | p.Ser775fs |
| 2:25239215:A:G | rs74708853 | missense | c.2323T > C | p.Ser775Pro |
| 2:25239215:A:T | NA | missense | c.2323T > A | p.Ser775Thr |
| 2:25239216:C:G | NA | splice_acceptor | c.2323-1G > C | |
| 2:25239216:C:T | rs1324347218 | splice_acceptor | c.2323-1G > A | |
| 2:25239217:T:A | rs765045799 | splice_acceptor | c.2323-2A > T | |
| 2:25239217:T:C | rs765045799 | splice_acceptor | c.2323-2A > G | |
| 2:25239217:T:G | NA | splice_acceptor | c.2323-2A > C | |
| 2:25240299:TACC | NA | frameshift | c.2319_2322+2del | p.Glu774fs |
| TCG:T | | | CGAGGT | |
| 2:25240300:A:AC | NA | splice_donor | c.2321_2322+1dup | |
| CT | | | AGG | |
| 2:25240300:A:C | NA | splice_donor | c.2322+2T > G | |
| 2:25240300:A:G | NA | splice_donor | c.2322+2T > C | |
| 2:25240300:AC:A | NA | splice_donor | c.2322+1delG | |
| 2:25240300:ACCT | NA | splice_donor | c.2305_23221+1del | p.Ile769_Glu774 |
| CGAGAAATCGCG | | | ATCTCGCGATTTCT | del |
| AGAT:A | | | CGAGG | |
| 2:25240300:ACCT | NA | splice_donor | c.2302_2322+1del | p.Asp768_Glu774 |
| CGAGAAATCGCG | | | GACATCTCGCGATT | del |
| AGATGTC:A | | | TCTCGAGG | |
| 2:25240301:C:A | rs903011938 | splice_donor | c.2322+1G > T | |
| 2:25240301:C:CC | NA | frameshift | c.2313_2322dupAT | p.Ser775fs |
| TCGAGAAAT | | | TTCTCGAG | |
| 2:25240301:C:G | NA | splice_donor | c.2322+1G > C | |
| 2:25240301:C:T | rs903011938 | splice_donor | c.2322+1G > A | |
| 2:25240301:CCT: | NA | frameshift | c.2321_2322delAG | p.Glu774fs |
| C | | | | |
| 2:25240301:CCTC | NA | frameshift | c.2318_2322delTC | p.Glu774fs |
| GA:C | | | GAG | |
| 2:25240302:C:A | rs753017271 | missense | c.2322G > T | p.Glu774Asp |
| 2:25240302:C:CT | NA | frameshift | c.2314_2321dupTT | p.Glu774fs |
| CGAGAAA | | | TCTCGA | |
| 2:25240302:C:G | rs753017271 | missense | c.2322G > C | p.Glu774Asp |
| 2:25240302:CTCG | NA | frameshift | c.2318_2321delTC | p.Leu773fs |
| A:C | | | GA | |
| 2:25240303:T:A | NA | missense | c.2321A > T | p.Glu774Val |
| 2:25240303:T:C | | missense | c.2321A > G | p.Glu774Gly |
| 2:25240303:T:G | NA | missense | c.2321A > C | p.Glu774Ala |
| 2:25240303:T:TC | NA | frameshift | c.2320dupG | p.Glu774fs |
| 2:25240303:T:TC | rs761980712 | frameshift | c.2311_2320dupCG | p.Glu774fs |
| GAGAAATCG | | | ATTTCTCG | |
| 2:25240303:TC:T | NA | frameshift | c.2320delG | p.Glu774fs |
| 2:25240304:C:A | NA | stop_gained | c.2320G > T | p.Glu774* |
| 2:25240304:C:CG | NA | frameshift | c.2319dupC | p.Glu774fs |
| 2:25240304:C:T | rs760624806 | missense | c.2320G > A | p.Glu774Lys |
| 2:25240304:CGA | NA | frameshift | c.2315_2319delTTC | p.Phe772fs |
| GAA:C | | | TC | |
| 2:25240305:G:GA | NA | frameshift | c.2290_2318dupA | p.Glu774fs |
| GAAATCGCGAGA | | | GTGACAAGAGGGA | |
| TGTCCCTCTTGTC | | | CATCTCGCGATTTC | |
| ACT | | | T | |
| 2:25240305:GAG | NA | inframe_indel | c.2316_2318delTCT | p.Leu773del |
| A:G | | | | |
| 2:25240306:A:C | rs764303486 | missense | c.2318T > G | p.Leu773Arg |
| 2:25240306:A:G | NA | missense | c.2318T > C | p.Leu773Pro |
| 2:25240306:A:T | NA | missense | c.2318T > A | p.Leu773His |
| 2:25240306:AG:A | NA | frameshift | c.2317delC | p.Leu773fs |
| 2:25240307:G:A | NA | missense | c.2317C > T | p.Leu773Phe |
| 2:25240307:G:C | NA | missense | c.2317C > G | p.Leu773Val |
| 2:25240307:G:GA | NA | frameshift | c.2315_2316dupTT | p.Leu773fs |
| A | | | | |
| 2:25240307:G:T | rs754336556 | missense | c.2317C > A | p.Leu773Ile |
| 2:25240307:GA:G | NA | frameshift | c.2316delT | p.Leu773fs |
| 2:25240307:GAA: | NA | frameshift | c.2315_2316delTT | p.Phe772fs |
| G | | | | |
| 2:25240308:A:AA | NA | inframe_indel | c.2283_2315dupG | p.Arg771_Phe772 |
| ATCGCGAGATGTC | | | GGCGTTAGTGACAA | insLeuGlyValSerA |
| CCTCTTGTCACTA | | | GAGGGACATCTCGC | spLysArgAspIleSer |
| ACGCCC | | | GATT | Arg |
| 2:25240308:A:C | NA | missense | c.2316T > G | p.Phe772Leu |
| 2:25240308:A:T | NA | missense | c.2316T > A | p.Phe772Leu |
| 2:25240308:AAAT | NA | frameshift | c.2312_2315delGA | p.Arg771fs |
| C:A | | | TT | |
| 2:25240309:A:AA | NA | frameshift | c.2272_2314dupGT | p.Phe772fs |
| TCGCGAGATGTCC | | | GGTGGCCATGGGC | |
| CTCTTGTCACTAA | | | GTTAGTGACAAGA | |
| CGCCCATGGCCAC | | | GGGACATCTCGCGA | |
| CAC | | | T | |
| 2:25240309:A:AT | NA | frameshift | c.2314_2315insGA | p.Phe772fs |
| C | | | | |
| 2:25240309:A:C | NA | missense | c.2315T > G | p.Phe772Cys |
| 2:25240309:A:G | NA | missense | c.2315T > C | p.Phe772Ser |
| 2:25240309:AATC | NA | frameshift | c.2307_2314delCT | p.Phe772fs |
| GCGAG:A | | | CGCGAT | |
| 2:25240310:A:AT | NA | frameshift | c.2295_2313dupCA | p.Phe772fs |
| CGCGAGATGTCCC | | | AGAGGGACATCTC | |
| TCTTG | | | GCGA | |
| 2:25240310:A:G | NA | missense | c.2314T > C | p.Phe772Leu |
| 2:25240310:A:T | NA | missense | c.2314T > A | p.Phe772Ile |
| 2:25240310:AT:A | NA | frameshift | c.2313delA | p.Leu773fs |
| 2:25240311:T:TC | NA | frameshift | c.2288_2312dupTT | p.Phe772fs |
| GCGAGATGTCCCT | | | AGTGACAAGAGGG | |
| CTTGTCACTAA | | | ACATCTCGCG | |
| 2:25240311:TC:T | NA | frameshift | c.2312delG | p.Arg771fs |
| 2:25240311:TCGC | NA | frameshift | c.2309_2312delCG | p.Ser770fs |
| G:T | | | CG | |
| 2:25240312:C:A | rs757823678 | missense | c.2312G > T | p.Arg771Leu |
| 2:25240312:C:CG | NA | frameshift | c.2311_2312insAA | p.Arg771fs |
| ATTT | | | ATC | |
| 2:25240312:C:G | NA | missense | c.2312G > C | p.Arg771Pro |
| 2:25240312:C:T | rs757823678 | missense | c.2312G > A | p.Arg771Gln |
| 2:25240312:CG:C | NA | frameshift | c.2311delC | p.Arg771fs |
| 2:25240312:CGC | NA | frameshift | c.2289_2311delTA | p.Ser764fs |
| GAGATGTCCCTCT | | | GTGACAAGAGGGA | |
| TGTCACTA:C | | | CATCTCGC | |
| 2:25240313:G:A | rs779626155 | stop_gained | c.2311C > T | p.Arg771* |
| 2:25240313:G:C | NA | missense | c.2311C > G | p.Arg771Gly |
| 2:25240313:G:GC | NA | frameshift | c.2310dupG | p.Arg771fs |
| 2:25240313:GCG | NA | frameshift | c.2292_2310delTG | p.Lys766fs |
| AGATGTCCCTCTT | | | ACAAGAGGGACAT | |
| GTCA:G | | | CTCG | |
| 2:25240314:C:CG | NA | inframe_indel | c.2307_2309dupCT | p.Ser770dup |
| AG | | | C | |
| 2:25240314:CGA: | NA | frameshift | c.2308_2309delTC | p.Ser770fs |
| C | | | | |
| 2:25240315:G:A | rs758845779 | missense | c.2309C > T | p.Ser770Leu |
| 2:25240315:G:C | rs758845779 | missense | c.2309C > G | p.Ser770Trp |
| 2:25240315:G:GA | NA | frameshift | c.2308dupT | p.Ser770fs |
| 2:25240315:G:T | rs758845779 | stop_gained | c.2309C > A | p.Ser770* |
| 2:25240315:GA:G | NA | frameshift | c.2308delT | p.Ser770fs |
| 2:25240316:A:C | NA | missense | c.2308T > G | p.Ser770Ala |
| 2:25240316:A:G | rs1275276226 | missense | c.2308T > C | p.Ser770Pro |
| 2:25240316:AG:A | NA | frameshift | c.2307delC | p.Ser770fs |
| 2:25240317:G:C | NA | missense | c.2307C > G | p.Ile769Met |
| 2:25240317:G:GT | NA | frameshift | c.2306_2307insA | p.Ser770fs |
| 2:25240317:GA:G | NA | frameshift | c.2306delT | p.Ile769fs |
| 2:25240318:A:C | rs746704362 | missense | c.2306T > G | p.Ile769Ser |
| 2:25240318:A:G | rs746704362 | missense | c.2306T > C | p.Ile769Thr |
| 2:25240318:A:T | rs746704362 | missense | c.2306T > A | p.Ile769Asn |
| 2:25240318:AT:A | NA | frameshift | c.2305delA | p.Ile769fs |
| 2:25240319:T:C | NA | missense | c.2305A > G | p.Ile769Val |
| 2:25240319:T:G | NA | missense | c.2305A > C | p.Ile769Leu |
| 2:25240320:G:C | NA | missense | c.2304C > G | p.Asp768Glu |
| 2:25240320:G:T | NA | missense | c.2304C > A | p.Asp768Glu |
| 2:25240320:GT:G | NA | frameshift | c.2303delA | p.Asp768fs |
| 2:25240321:T:A | NA | missense | c.2303A > T | p.Asp768Val |
| 2:25240321:T:C | rs1181120114 | missense | c.2303A > G | p.Asp768Gly |
| 2:25240321:TC:T | NA | frameshift | c.2302delG | p.Asp768fs |
| 2:25240322:C:A | rs767983115 | missense | c.2302G > T | p.Asp768Tyr |
| 2:25240322:C:G | NA | missense | c.2302G > C | p.Asp768His |
| 2:25240322:C:T | NA | missense | c.2302G > A | p.Asp768Asn |
| 2:25240323:C:CC | NA | frameshift | c.2299_2300dupA | p.Asp768fs |
| T | | | G | |
| 2:25240324:CT:C | NA | frameshift | c.2299delA | p.Arg767fs |
| 2:25240324:CTCT | NA | frameshift | c.2295_2299delCA | p.Asp765fs |
| TG:C | | | AGA | |
| 2:25240325:T:C | NA | missense | c.2299A > G | p.Arg767Gly |
| 2:25240325:TC:T | NA | frameshift | c.2298delG | p.Arg767fs |
| 2:25240326:C:A | NA | missense | c.2298G > T | p.Lys766Asn |
| 2:25240326:C:G | NA | missense | c.2298G > C | p.Lys766Asn |
| 2:25240326:CT:C | NA | frameshift | c.2297delA | p.Lys766fs |
| 2:25240326:CTT:C | rs750475955 | frameshift | c.2296_2297delAA | p.Lys766fs |
| 2:25240327:TTG: | NA | frameshift | c.2295_2296delCA | p.Asp765fs |
| T | | | | |
| 2:25240328:T:A | NA | stop_gained | c.2296A > T | p.Lys766* |
| 2:25240328:T:C | NA | missense | c.2296A > G | p.Lys766Glu |
| 2:25240328:T:TA | NA | frameshift | c.2295_2296insT | p.Lys766fs |
| 2:25240328:TG:T | NA | frameshift | c.2295delC | p.Asp765fs |
| 2:25240329:G:GT | NA | frameshift | c.2294dupA | p.Asp765fs |
| 2:25240330:T:C | NA | missense | c.2294A > G | p.Asp765Gly |
| 2:25240331:C:A | NA | missense | c.2293G > T | p.Asp765Tyr |
| 2:25240332:AC:A | NA | frameshift | c.2291delG | p.Ser764fs |
| 2:25240333:C:CT | NA | frameshift | c.2290dupA | p.Ser764fs |
| 2:25240333:CT:C | NA | frameshift | c.2290delA | p.Ser764fs |
| 2:25240334:T:TA | NA | frameshift | c.2289dupT | p.Ser764fs |
| 2:25240334:TA:T | NA | frameshift | c.2289delT | p.Ser764fs |
| 2:25240336:A:T | rs1178258952 | missense | c.2288T > A | p.Va1763Asp |
| 2:25240336:AC:A | NA | frameshift | c.2287delG | p.Va1763fs |
| 2:25240337:C:CA | NA | frameshift | c.2286_2287insT | p.Va1763fs |
| 2:25240337:C:CG | NA | frameshift | c.2286_2287insTA | p.Va1763fs |
| TTA | | | AC | |
| 2:25240337:C:T | rs1369746569 | missense | c.2287G > A | p.Va1763Ile |
| 2:25240338:GC:G | NA | frameshift | c.2285delG | p.Gly762fs |
| 2:25240338:GCCC | NA | frameshift | c.2276_2285delTG | p.Va1759fs |
| ATGGCCA:G | | | GCCATGGG | |
| 2:25240342:A:C | NA | missense | c.2282T > G | p.Met761Arg |
| 2:25240342:A:G | rs963262801 | missense | c.2282T > C | p.Met761Thr |
| 2:25240342:ATG | NA | inframe_indel | c.2270_2281delAT | p.Asn757_Ala760 |
| GCCACCACAT:A | | | GTGGTGGCCA | del |
| 2:25240343:T:C | rs780695582 | missense | c.2281A > G | p.Met761Val |
| 2:25240343:T:G | NA | missense | c.2281A > C | p.Met761Leu |
| 2:25240343:T:TG | NA | frameshift | c.2280dupC | p.Met761fs |
| 2:25240343:TG:T | NA | frameshift | c.2280delC | p.Met761fs |
| 2:25240345:G:A | NA | missense | c.2279C > T | p.Ala760Val |
| 2:25240345:G:C | NA | missense | c.2279C > G | p.Ala760Gly |
| 2:25240345:G:GC | NA | frameshift | c.2278dupG | p.Ala760fs |
| 2:25240345:GCG | NA | frameshift | c.2278delG | p.Ala760fs |
| 2:25240345:GCCA: | NA | inframe_indel | c.2276_2278delTG | p.Va1759del |
| G | | | G | |
| 2:25240346:CCAC | NA | frameshift | c.2267_2277delAG | p.Glu756fs |
| CACATTCT:C | | | AATGTGGTG | |
| 2:25240347:CA:C | NA | frameshift | c.2276delT | p.Va1759fs |
| 2:25240348:AC:A | NA | frameshift | c.2275delG | p.Va1759fs |
| 2:25240349:C:G | NA | missense | c.2275G > C | p.Va1759Leu |
| 2:25240349:C:T | NA | missense | c.2275G > A | p.Va1759Met |
| 2:25240349:CCA: | NA | frameshift | c.2273_2274delTG | p.Va1758fs |
| C | | | | |
| 2:25240352:C:G | NA | missense | c.2272G > C | p.Va1758Leu |
| 2:25240352:C:T | NA | missense | c.2272G > A | p.Va1758Met |
| 2:25240352:CA:C | NA | frameshift | c.2271delT | p.Asn757fs |
| 2:25240352:CATT | NA | frameshift | c.2256_2271delCT | p.Phe752fs |
| CTCAAAGAGCCAG: | | | GGCTCTTTGAGAAT | |
| C | | | | |
| 2:25240353:A:C | NA | missense | c.2271T > G | p.Asn757Lys |
| 2:25240353:A:T | NA | missense | c.2271T > A | p.Asn757Lys |
| 2:25240353:AT:A | NA | frameshift | c.2270delA | p.Asn757fs |
| 2:25240353:ATTC | NA | frameshift | c.2248_2270delCC | p.Pro750fs |
| TCAAAGAGCCAG | | | CTTGTTCTGGCTCTT | |
| AAGAAGGG:A | | | TGAGAA | |
| 2:25240354:T:A | rs747716263 | missense | c.2270A > T | p.Asn757Ile |
| 2:25240354:T:C | NA | missense | c.2270A > G | p.Asn757Ser |
| 2:25240354:T:TTC | NA | frameshift | c.2268_2269dupG | p.Asn757fs |
| | | | A | |
| 2:25240355:T:A | NA | missense | c.2269A > T | p.Asn757Tyr |
| 2:25240356:C:A | rs769718039 | missense | c.2268G > T | p.Glu756Asp |
| 2:25240356:C:G | NA | missense | c.2268G > C | p.Glu756Asp |
| 2:25240356:CTCA | NA | frameshift | c.2251_2267delTTC | p.Phe751fs |
| AAGAGCCAGAAG | | | TTCTGGCTCTTTGA | |
| AA:C | | | | |
| 2:25240357:T:C | NA | missense | c.2267A > G | p.Glu756Gly |
| 2:25240357:T:TC | NA | frameshift | c.2265_2266dupTG | p.Glu756fs |
| A | | | | |
| 2:25240358:C:A | NA | stop_gained | c.2266G > T | p.Glu756* |
| 2:25240358:C:CA | rs1386755076 | frameshift | c.2265dupT | p.Glu756fs |
| 2:25240358:C:T | rs1418213272 | missense | c.2266G > A | p.Glu756Lys |
| 2:25240358:CA:C | rs752551332 | frameshift | c.2265delT | p.Phe755fs |
| 2:25240358:CAA: | rs755800729 | frameshift | c.2264_2265delTT | p.Phe755fs |
| C | | | | |
| 2:25240358:CAAA | NA | frameshift | c.2261_2265delTCT | p.Leu754fs |
| GA:C | | | TT | |
| 2:25240359:A:AT | NA | frameshift | c.2264_2265insA | p.Phe755fs |
| 2:25240359:A:C | NA | missense | c.2265T > G | p.Phe755Leu |
| 2:25240359:A:T | NA | missense | c.2265T > A | p.Phe755Leu |
| 2:25240360:A:C | NA | missense | c.2264T > G | p.Phe755Cys |
| 2:25240360:A:G | rs536841393 | missense | c.2264T > C | p.Phe755Ser |
| 2:25240360:AAG: | NA | frameshift | c.2262_2263delCT | p.Phe755fs |
| A | | | | |
| 2:25240360:AAG | NA | inframe_indel | c.2258_2263delGG | p.Trp753_Leu754 |
| AGCC:A | | | CTCT | del |
| 2:25240360:AAG | NA | frameshift | c.2250_2263delCTT | p.Phe751fs |
| AGCCAGAAGAAG: | | | CTTCTGGCTCT | |
| A | | | | |
| 2:25240361:A:C | NA | missense | c.2263T > G | p.Phe755Val |
| 2:25240361:A:G | NA | missense | c.2263T > C | p.Phe755Leu |
| 2:25240361:A:T | rs369230209 | missense | c.2263T > A | p.Phe755Ile |
| 2:25240361:AGA | NA | frameshift | c.2246_2262delGC | p.Arg749fs |
| GCCAGAAGAAGG | | | CCCTTCTTCTGGCTC | |
| GGC:A | | | | |
| 2:25240362:GA:G | NA | frameshift | c.2261delT | p.Leu754fs |
| 2:25240362:GAG | NA | frameshift | c.2258_2261delGG | p.Trp753fs |
| CC:G | | | CT | |
| 2:25240363:A:C | rs762636955 | missense | c.2261T > G | p.Leu754Arg |
| 2:25240363:A:G | NA | missense | c.2261T > C | p.Leu754Pro |
| 2:25240363:A:T | NA | missense | c.2261T > A | p.Leu754His |
| 2:25240364:G:C | NA | missense | c.2260C > G | p.Leu754Val |
| 2:25240364:GCCA | NA | frameshift | c.2243_2259delAT | p.Asp748fs |
| GAAGAAGGGGCG | | | CGCCCCTTCTTCTG | |
| AT:G | | | G | |
| 2:25240365:C:A | NA | missense | c.2259G > T | p.Trp753Cys |
| 2:25240365:C:CTT | NA | frameshift | c.2258_2259insAA | p.Trp753fs |
| 2:25240365:C:G | rs770785915 | missense | c.2259G > C | p.Trp753Cys |
| 2:25240365:C:T | NA | stop_gained | c.2259G > A | p.Trp753* |
| 2:25240365:CCAG: | NA | inframe_indel | c.2256_2258delCT | p.Phe752_Trp753 |
| C | | | G | delinsLeu |
| 2:25240366:C:A | rs775537912 | missense | c.2258G > T | p.Trp753Leu |
| 2:25240366:C:CA | NA | frameshift | c.2256_2257dupCT | p.Trp753fs |
| G | | | | |
| 2:25240366:C:G | | missense | c.2258G > C | p.Trp753Ser |
| 2:25240366:C:T | | stop_gained | c.2258G > A | p.Trp753* |
| 2:25240366:CAG: | NA | frameshift | c.2256_2257delCT | p.Phe752fs |
| C | | | | |
| 2:25240366:CAG | rs749132507 | inframe_indel | c.2255_2257delTCT | p.Phe752del |
| A:C | | | | |
| 2:25240366:CAG | NA | frameshift | c.2245_2257delCG | p.Arg749fs |
| AAGAAGGGGCG: | | | CCCCTTCTTCT | |
| C | | | | |
| 2:25240367:A:C | NA | missense | c.2257T > G | p.Trp753Gly |
| 2:25240367:A:G | NA | missense | c.2257T > C | p.Trp753Arg |
| 2:25240367:A:T | rs1189107128 | missense | c.2257T > A | p.Trp753Arg |
| 2:25240367:AG:A | rs770968422 | frameshift | c.2256delC | p.Trp753fs |
| 2:25240367:AGA | NA | frameshift | c.2253_2256delCTT | p.Phe752fs |
| AG:A | | | c | |
| 2:25240367:AGA | NA | frameshift | c.2246_2256delGC | p.Arg749fs |
| AGAAGGGGC:A | | | CCCTTCTTCC | |
| 2:25240368:G:C | rs760959622 | missense | c.2256C > G | p.Phe752Leu |
| 2:25240368:G:GC | NA | frameshift | c.2255_2256insG | p.Phe752fs |
| 2:25240368:G:T | NA | missense | c.2256C > A | p.Phe752Leu |
| 2:25240368:GA:G | NA | frameshift | c.2255delT | p.Phe752fs |
| 2:25240368:GAA: | NA | frameshift | c.2254_2255delTT | p.Phe752fs |
| G | | | | |
| 2:25240369:A:AA | NA | frameshift | c.2242_2254dupG | p.Phe752fs |
| GAAGGGGCGATC | | | ATCGCCCCTTCT | |
| 2:25240369:A:C | rs764464925 | missense | c.2255T > G | p.Phe752Cys |
| 2:25240369:A:G | NA | missense | c.2255T > C | p.Phe752Ser |
| 2:25240369:AAG: | NA | frameshift | c.2253_2254delCT | p.Phe752fs |
| A | | | | |
| 2:25240369:AAG | NA | frameshift | c.2247_2254delCC | p.Pro750fs |
| AAGGGG:A | | | CCTTCT | |
| 2:25240370:A:AG | NA | frameshift | c.2253_2254insAA | p.Phe752fs |
| AAGGGGCTTT | | | AGCCCCTTC | |
| 2:25240370:A:C | NA | missense | c.2254T > G | p.Phe752Val |
| 2:25240370:A:G | rs776844126 | missense | c.2254T > C | p.Phe752Leu |
| 2:25240370:A:T | | missense | c.2254T > A | p.Phe752Ile |
| 2:25240370:AG:A | NA | frameshift | c.2253delC | p.Phe752fs |
| 2:25240370:AGA | NA | frameshift | c.2247_2253delCC | p.Pro750fs |
| AGGGG:A | | | CCTTC | |
| 2:25240371:G:C | rs762020470 | missense | c.2253C > G | p.Phe751Leu |
| 2:25240371:G:GA | NA | frameshift | c.2252dupT | p.Phe752fs |
| 2:25240371:G:GT | NA | frameshift | c.2252_2253insA | p.Phe751fs |
| 2:25240371:G:T | NA | missense | c.2253C > A | p.Phe751Leu |
| 2:25240371:GA:G | NA | frameshift | c.2252delT | p.Phe751fs |
| 2:25240372:A:C | rs765813304 | missense | c.2252T > G | p.Phe751Cys |
| 2:25240372:A:G | rs765813304 | missense | c.2252T > C | p.Phe751Ser |
| 2:25240373:A:AG | rs1195416744 | frameshift | c.2250dupC | p.Phe751fs |
| 2:25240373:A:C | NA | missense | c.2251T > G | p.Phe751Val |
| 2:25240373:A:G | NA | missense | c.2251T > C | p.Phe751Leu |
| 2:25240373:A:T | rs750962348 | missense | c.2251T > A | p.Phe751Ile |
| 2:25240373:AG:A | NA | frameshift | c.2250delC | p.Phe751fs |
| 2:25240374:GGG | NA | frameshift | c.2246_2249delGC | p.Arg749fs |
| GCG | | | CC | |
| 2:25240375:G:C | NA | missense | c.2249C > G | p.Pro750Arg |
| 2:25240375:G:GG | NA | frameshift | c.2230_2248dupAA | p.Pro750fs |
| GCGATCATCTCCC | | | GGAGGGAGATGAT | |
| TCCTT | | | CGCC | |
| 2:25240375:GGG | NA | inframe_indel | c.2240_2248delAT | p.Asp747_Pro750 |
| CGATCAT:G | | | GATCGCC | delinsAla |
| 2:25240376:G:A | NA | missense | c.2248C > T | p.Pro750Ser |
| 2:25240376:G:C | NA | missense | c.2248C > G | p.Pro750Ala |
| 2:25240376:G:GG | NA | frameshift | c.2235_2247dupG | p.Pro750fs |
| CGATCATCTCCC | | | GGAGATGATCGC | |
| 2:25240376:GGC: | NA | frameshift | c.2246_2247delGC | p.Arg749fs |
| G | | | | |
| 2:25240377:G:GA | NA | frameshift | c.2246_2247insT | p.Phe751fs |
| 2:25240377:G:GC | NA | frameshift | c.2246dupG | p.Phe751fs |
| 2:25240377:G:GC | NA | frameshift | c.2246_2247insAG | p.Pro750fs |
| GATCATCTCCCTC | | | CCAGAGGCCCAAG | |
| CTTGGGCCTCTGG | | | GAGGGAGATGATC | |
| CT | | | G | |
| 2:25240377:GC:G | NA | frameshift | c.2246delG | p.Arg749fs |
| 2:25240377:GCG | NA | frameshift | c.2243_2246delAT | p.Asp748fs |
| AT:G | | | CG | |
| 2:25240377:GCG | NA | inframe_indel | c.2226_2246delGC | p.Pro743_Arg749 |
| ATCATCTCCCTCCT | | | CCAAGGAGGGAGA | del |
| TGGGC:G | | | TGATCG | |
| 2:25240378:C:A | rs34843713 | missense | c.2246G > T | p.Arg749Leu |
| 2:25240378:C:G | rs34843713 | missense | c.2246G > C | p.Arg749Pro |
| 2:25240378:C:T | rs34843713 | missense | c.2246G > A | p.Arg749His |
| 2:25240378:CG:C | NA | frameshift | c.2245delC | p.Arg749fs |
| 2:25240378:CGAT | NA | frameshift | c.2241_2245delTG | p.Asp747fs |
| CA:C | | | ATC | |
| 2:25240379:G:A | rs754613602 | missense | c.2245C > T | p.Arg749Cys |
| 2:25240379:G:C | rs754613602 | missense | c.2245C > G | p.Arg749Gly |
| 2:25240379:G:GT | NA | frameshift | c.2244_2245insA | p.Arg749fs |
| 2:25240379:G:T | NA | missense | c.2245C > A | p.Arg749Ser |
| 2:25240379:GA:G | NA | frameshift | c.2244delT | p.Arg749fs |
| 2:25240379:GATC | NA | frameshift | c.2241_2244delTG | p.Asp748fs |
| A:G | | | AT | |
| 2:25240380:AT:A | NA | frameshift | c.2243delA | p.Asp748fs |
| 2:25240381:T:TC | NA | frameshift | c.2242dupG | p.Asp748fs |
| 2:25240381:T:TC | NA | frameshift | c.2224_2242dupCG | p.Asp748fs |
| ATCTCCCTCCTTG | | | GCCCAAGGAGGGA | |
| GGCCG | | | GATG | |
| 2:25240381:TC:T | NA | frameshift | c.2242delG | p.Asp748fs |
| 2:25240383:A:AT | NA | frameshift | c.2239_2240dupG | p.Asp747fs |
| C | | | A | |
| 2:25240384:T:C | NA | missense | c.2240A > G | p.Asp747Gly |
| 2:25240384:T:G | NA | missense | c.2240A > C | p.Asp747Ala |
| 2:25240384:TCTC | NA | frameshift | c.2233_2239delGA | p.Glu745fs |
| CCTC:T | | | GGGAG | |
| 2:25240385:C:A | NA | missense | c.2239G > T | p.Asp747Tyr |
| 2:25240385:CT:C | NA | frameshift | c.2238delA | p.Asp747fs |
| 2:25240385:CTCC | NA | frameshift | c.2219_2238delAT | p.Asp740fs |
| CTCCTTGGGCCGC | | | GCGCGGCCCAAGG | |
| GCAT:C | | | AGGGA | |
| 2:25240386:TC:T | NA | frameshift | c.2237delG | p.Gly746fs |
| 2:25240387:C:T | NA | missense | c.2237G > A | p.Gly746Glu |
| 2:25240388:C:A | NA | stop_gained | c.2236G > T | p.Gly746* |
| 2:25240388:C:T | rs747626849 | missense | c.2236G > A | p.Gly746Arg |
| 2:25240389:CTCC | NA | frameshift | c.2231_2234delAG | p.Lys744fs |
| T:C | | | GA | |
| 2:25240390:T:TCC | NA | frameshift | c.2232_2233dupG | p.Glu745fs |
| | | | G | |
| 2:25240390:T:TCC | NA | frameshift | c.2227_2233dupCC | p.Glu745fs |
| TTGGG | | | CAAGG | |
| 2:25240391:C:A | rs1328524162 | stop_gained | c.2233G > T | p.Glu745* |
| 2:25240392:C:CT | NA | frameshift | c.2231dupA | p.Glu745fs |
| 2:25240392:CT:C | NA | frameshift | c.2231delA | p.Lys744fs |
| 2:25240394:T:A | rs1389075270 | stop_gained | c.2230A > T | p.Lys744* |
| 2:25240394:T:C | NA | missense | c.2230A > G | p.Lys744Glu |
| 2:25240394:T:TG | NA | frameshift | c.2229dupC | p.Lys744fs |
| 2:25240394:T:TG | NA | frameshift | c.2177_2229dupGC | p.Lys744fs |
| GGCCGCGCATCAT | | | ACTGGCCGGCTCTT | |
| GCAGGAGGCGGT | | | CTTTGAGTTCTACC | |
| AGAACTCAAAGA | | | GCCTCCTGCATGAT | |
| AGAGCCGGCCAG | | | GCGCGGCCC | |
| TGC | | | | |
| 2:25240394:T:TTA | NA | frameshift | c.2229_2230insTA | p.Lys744fs |
| 2:25240394:TG:T | NA | frameshift | c.2229delC | p.Lys744fs |
| 2:25240394:TGG | NA | frameshift | c.2225_2229delGG | p.Arg742fs |
| GCC:T | | | CCC | |
| 2:25240396:G:A | rs755673156 | missense | c.2228C > T | p.Pro743Leu |
| 2:25240396:G:C | rs755673156 | missense | c.2228C > G | p.Pro743Arg |
| 2:25240396:G:GG | NA | frameshift | c.2223_2227dupGC | p.Pro743fs |
| CCGC | | | GGC | |
| 2:25240396:G:T | NA | missense | c.2228C > A | p.Pro743His |
| 2:25240397:G:A | rs1433353413 | missense | c.2227C > T | p.Pro743Ser |
| 2:25240397:G:C | rs1433353413 | missense | c.2227C > G | p.Pro743Ala |
| 2:25240397:G:GC | NA | frameshift | c.2226dupG | p.Pro743fs |
| 2:25240397:GC:G | rs778606920 | frameshift | c.2226delG | p.Lys744fs |
| 2:25240398:C:CC | rs745364706 | frameshift | c.2224_2225dupCG | p.Pro743fs |
| G | | | | |
| 2:25240398:CCG: | NA | frameshift | c.2224_2225delCG | p.Arg742fs |
| C | | | | |
| 2:25240398:CCGC | NA | frameshift | c.2222_2225delCG | p.Ala741fs |
| G:C | | | CG | |
| 2:25240398:CCGC | NA | frameshift | c.2215_2225delCA | p.His739fs |
| GCATCATG:C | | | TGATGCGCG | |
| 2:25240399:C:CG | NA | frameshift | c.2224dupC | p.Arg742fs |
| 2:25240399:C:CT | NA | frameshift | c.2224_2225insA | p.Arg742fs |
| 2:25240399:C:G | rs749282210 | missense | c.2225G > C | p.Arg742Pro |
| 2:25240399:C:T | NA | missense | c.2225G > A | p.Arg742Gln |
| 2:25240399:CG:C | NA | frameshift | c.2224delC | p.Arg742fs |
| 2:25240399:CGC | NA | frameshift | c.2220_2224delTG | p.Asp740fs |
| GCA:C | | | CGC | |
| 2:25240399:CGC | NA | frameshift | c.2215_2224delCA | p.His739fs |
| GCATCATG:C | | | TGATGCGC | |
| 2:25240399:CGC | NA | inframe_indel | c.2213_2224delTG | p.Leu738_Ala741 |
| GCATCATGCA:C | | | CATGATGCGC | del |
| 2:25240399:CGC | NA | frameshift | c.2209_2224delCT | p.Leu737fs |
| GCATCATGCAGGA | | | CCTGCATGATGCGC | |
| G:C | | | | |
| 2:25240400:G:C | NA | missense | c.2224C > G | p.Arg742Gly |
| 2:25240402:G:A | rs770568549 | missense | c.2222C > T | p.Ala741Val |
| 2:25240402:G:C | NA | missense | c.2222C > G | p.Ala741Gly |
| 2:25240402:G:GC | NA | frameshift | c.2221dupG | p.Ala741fs |
| 2:25240402:G:T | rs770568549 | missense | c.2222C > A | p.Ala741Glu |
| 2:25240403:C:CA | NA | frameshift | c.2220dupT | p.Ala741fs |
| 2:25240403:C:CA | NA | frameshift | c.2211_2220dupCC | p.Ala741fs |
| TCATGCAGG | | | TGCATGAT | |
| 2:25240403:C:G | NA | missense | c.2221G > C | p.Ala741Pro |
| 2:25240403:C:T | NA | missense | c.2221G > A | p.Ala741Thr |
| 2:25240403:CATC | NA | frameshift | c.2217_2220delTG | p.His739fs |
| A:C | | | AT | |
| 2:25240404:A:AA | NA | inframe_indel | c.2219_2220insCG | p.Asp740_Ala741 |
| CG | | | T | insVal |
| 2:25240406:C:CA | NA | frameshift | c.2217dupT | p.Asp740fs |
| 2:25240407:A:AT | NA | frameshift | c.2174- | p.His739fs |
| GCAGGAGGCGGT | | | 1_2216dupGAGGG | |
| AGAACTCAAAGA | | | CACTGGCCGGCTCT | |
| AGAGCCGGCCAG | | | TCTTTGAGTTCTACC | |
| TGCCCTC | | | GCCTCCTGCA | |
| 2:25240408:T:C | NA | missense | c.2216A > G | p.His739Arg |
| 2:25240408:T:G | rs1053660507 | missense | c.2216A > C | p.His739Pro |
| 2:25240409:G:A | NA | missense | c.2215C > T | p.His739Tyr |
| 2:25240410:CAG | NA | inframe_indel | c.2211_2213delCC | p.Leu738del |
| G:C | | | T | |
| 2:25240411:A:AG | NA | frameshift | c.2212dupC | p.Leu738fs |
| 2:25240411:A:C | rs745714537 | missense | c.2213T > G | p.Leu738Arg |
| 2:25240411:A:G | NA | missense | c.2213T > C | p.Leu738Pro |
| 2:25240411:A:T | rs745714537 | missense | c.2213T > A | p.Leu738Gln |
| 2:25240411:AG:A | NA | frameshift | c.2212delC | p.Leu738fs |
| 2:25240412:G:C | rs1374722278 | missense | c.2212C > G | p.Leu738Val |
| 2:25240412:GGA | NA | frameshift | c.2198_2211delAG | p.Glu733fs |
| GGCGGTAGAACT: | | | TTCTACCGCCTC | |
| G | | | | |
| 2:25240413:GA:G | NA | frameshift | c.2210delT | p.Leu737fs |
| 2:25240414:A:C | rs768964533 | missense | c.2210T > G | p.Leu737Arg |
| 2:25240414:A:G | NA | missense | c.2210T > C | p.Leu737Pro |
| 2:25240414:A:T | NA | missense | c.2210T > A | p.Leu737His |
| 2:25240414:AG:A | NA | frameshift | c.2209delC | p.Leu737fs |
| 2:25240415:G:A | rs1340822377 | missense | c.2209C > T | p.Leu737Phe |
| 2:25240416:GCG | NA | frameshift | c.2198_2207delAG | p.Glu733fs |
| GTAGAACT:G | | | TTCTACCG | |
| 2:25240416:GCG | NA | frameshift | c.2192_2207delTCT | p.Phe731fs |
| GTAGAACTCAAAG | | | TTGAGTTCTACCG | |
| A:G | | | | |
| 2:25240417:C:A | NA | missense | c.2207G > T | p.Arg736Leu |
| 2:25240417:C:G | NA | missense | c.2207G > C | p.Arg736Pro |
| 2:25240417:C:T | rs139293773 | missense | c.2207G > A | p.Arg736His |
| 2:25240418:G:A | rs761934754 | missense | c.2206C > T | p.Arg736Cys |
| 2:25240418:G:C | rs761934754 | missense | c.2206C > G | p.Arg736Gly |
| 2:25240418:G:T | rs761934754 | missense | c.2206C > A | p.Arg736Ser |
| 2:25240419:G:C | rs765439043 | stop_gained | c.2205C > G | p.Tyr735* |
| 2:25240419:G:GT | NA | frameshift | c.2204dupA | p.Tyr735fs |
| 2:25240419:G:T | NA | stop_gained | c.2205C > A | p.Tyr735* |
| 2:25240419:GT:G | NA | frameshift | c.2204delA | p.Tyr735fs |
| 2:25240420:T:A | NA | missense | c.2204A > T | p.Tyr735Phe |
| 2:25240420:T:C | rs147828672 | missense | c.2204A > G | p.Tyr735Cys |
| 2:25240420:T:G | rs147828672 | missense | c.2204A > C | p.Tyr735Ser |
| 2:25240420:T:TA | NA | frameshift | c.2193_2203dupCT | p.Tyr735fs |
| GAACTCAAAG | | | TTGAGTTCT | |
| 2:25240420:TAG: | | frameshift | c.2202_2203delCT | p.Phe734fs |
| T | | | | |
| 2:25240420:TAGA | NA | frameshift | c.2197_2203delGA | p.Glu733fs |
| ACTC:T | | | GTTCT | |
| 2:25240421:A:AG | NA | frameshift | c.2174- | p.Tyr735fs |
| AACTCAAAGAAG | | | 2_2202dupAGAGG | |
| AGCCGGCCAGTG | | | GCACTGGCCGGCTC | |
| CCCTCT | | | TTCTTTGAGTTC | |
| 2:25240421:A:C | NA | missense | c.2203T > G | p.Tyr735Asp |
| 2:25240421:A:G | NA | missense | c.2203T > C | p.Tyr735His |
| 2:25240421:A:T | NA | missense | c.2203T > A | p.Tyr735Asn |
| 2:25240421:AG:A | NA | frameshift | c.2202delC | p.Tyr735fs |
| 2:25240421:AGA | NA | frameshift | c.2190_2202delCTT | p.Phe731fs |
| ACTCAAAGAAG:A | | | CTTTGAGTTC | |
| 2:25240422:G:C | | missense | c.2202C > G | p.Phe734Leu |
| 2:25240422:G:GA | NA | frameshift | c.2201dupT | p.Tyr735fs |
| 2:25240422:G:GA | NA | frameshift | c.2192_2201dupTC | p.Tyr735fs |
| ACTCAAAGA | | | TTTGAGTT | |
| 2:25240422:G:GA | NA | inframe_indel | c.2201_2202insAG | p.Phe734delinsLe |
| CT | | | T | uVal |
| 2:25240422:G:GA | NA | frameshift | c.2201_2202insAT | p.Phe734fs |
| T | | | | |
| 2:25240422:G:T | rs766854284 | missense | c.2202C > A | p.Phe734Leu |
| 2:25240422:GA:G | | frameshift | c.2201delT | p.Phe734fs |
| 2:25240422:GAA | NA | frameshift | c.2189_2201delTCT | p.Leu730fs |
| CTCAAAGAAGA:G | | | TCTTTGAGTT | |
| 2:25240423:A:C | rs1215180755 | missense | c.2201T > G | p.Phe734Cys |
| 2:25240423:A:G | rs1215180755 | missense | c.2201T > C | p.Phe734Ser |
| 2:25240423:AACT: | NA | inframe_indel | c.2198_2200delAG | p.Glu733_Phe734 |
| A | | | T | delinsVal |
| 2:25240423:AACT | NA | frameshift | c.2185_2200delCG | p.Arg729fs |
| CAAAGAAGAGCC | | | GCTCTTCTTTGAGT | |
| G:A | | | | |
| 2:25240424:A:C | rs751950768 | missense | c.2200T > G | p.Phe734Val |
| 2:25240424:A:G | NA | missense | c.2200T > C | p.Phe734Leu |
| 2:25240424:A:T | NA | missense | c.2200T > A | p.Phe734Ile |
| 2:25240425:C:CT | NA | frameshift | c.2198dupA | p.Phe734fs |
| 2:25240425:CTCA | NA | frameshift | c.2188_2198delCT | p.Leu730fs |
| AAGAAGAG:C | | | CTTCTTTGA | |
| 2:25240426:T:A | NA | missense | c.2198A > T | p.Glu733Val |
| 2:25240426:T:C | rs755376933 | missense | c.2198A > G | p.Glu733Gly |
| 2:25240426:T:G | NA | missense | c.2198A > C | p.Glu733Ala |
| 2:25240426:T:TC | NA | frameshift | c.2197dupG | p.Glu733fs |
| 2:25240426:TC:T | NA | frameshift | c.2197delG | p.Glu733fs |
| 2:25240426:TCAA | NA | inframe_indel | c.2183_2197delGC | p.Gly728_Phe732 |
| AGAAGAGCCGGC: | | | CGGCTCTTGTTTG | del |
| T | | | | |
| 2:25240427:C:A | NA | stop_gained | c.2197G > T | p.Glu733* |
| 2:25240427:C:CA | | frameshift | c.2196dupT | p.Glu733fs |
| 2:25240427:C:CA | rs771906613 | frameshift | c.2195_2196dupTT | p.Glu733fs |
| A | | | | |
| 2:25240427:C:CA | NA | frameshift | c.2196_2197insCT | p.Glu733fs |
| G | | | | |
| 2:25240427:C:G | NA | missense | c.2197G > C | p.Glu733Gln |
| 2:25240427:C:T | NA | missense | c.2197G > A | p.Glu733Lys |
| 2:25240427:CA:C | NA | frameshift | c.2196delT | p.Phe732fs |
| 2:25240427:CAA: | rs774944755 | frameshift | c.2195_2196delTT | p.Phe732fs |
| C | | | | |
| 2:25240427:CAAA | NA | frameshift | c.2193_2196delCTT | p.Phe731fs |
| G:C | | | T | |
| 2:25240427:CAAA | NA | frameshift | c.2192_2196delTCT | p.Phe731fs |
| GA:C | | | TT | |
| 2:25240427:CAAA | NA | frameshift | c.2190_2196delCTT | p.Phe731fs |
| GAAG:C | | | CTTT | |
| 2:25240428:A:C | NA | missense | c.2196T > G | p.Phe732Leu |
| 2:25240428:A:T | NA | missense | c.2196T > A | p.Phe732Leu |
| 2:25240428:AAA | rs761103716 | inframe_indel | c.2193_2195delCTT | p.Phe732del |
| G:A | | | | |
| 2:25240428:AAA | NA | inframe_indel | c.2190_2195delCTT | p.Phe731_Phe73 |
| GAAG:A | | | CTT | 2del |
| 2:25240429:A:C | rs767134940 | missense | c.2195T > G | p.Phe732Cys |
| 2:25240429:A:G | NA | missense | c.2195T > C | p.Phe732Ser |
| 2:25240429:A:T | NA | missense | c.2195T > A | p.Phe732Tyr |
| 2:25240429:AAG: | NA | frameshift | c.2193_2194delCT | p.Phe732fs |
| A | | | | |
| 2:25240429:AAG | NA | frameshift | c.2190_2194delCTT | p.Phe731fs |
| AAG:A | | | CT | |
| 2:25240430:A:C | NA | missense | c.2194T > G | p.Phe732Val |
| 2:25240430:A:G | NA | missense | c.2194T > C | p.Phe732Leu |
| 2:25240430:A:T | rs149043640 | missense | c.2194T > A | p.Phe732Ile |
| 2:25240430:AG:A | NA | frameshift | c.2193delC | p.Phe732fs |
| 2:25240430:AGA | NA | frameshift | c.2186_2193delGG | p.Arg729fs |
| AGAGCC:A | | | CTCTTC | |
| 2:25240431:G:C | NA | missense | c.2193C > G | p.Phe731Leu |
| 2:25240431:G:GC | NA | frameshift | c.2192_2193insG | p.Phe731fs |
| 2:25240431:G:GT | NA | frameshift | c.2192_2193insA | p.Phe731fs |
| 2:25240431:G:GT | rs768858047 | frameshift | c.2192_2193insAA | p.Phe731fs |
| T | | | | |
| 2:25240431:G:T | NA | missense | c.2193C > A | p.Phe731Leu |
| 2:25240431:GA:G | NA | frameshift | c.2192delT | p.Phe731fs |
| 2:25240431:GAA: | NA | frameshift | c.2191_2192delTT | p.Phe731fs |
| G | | | | |
| 2:25240432:A:C | rs755585212 | missense | c.2192T > G | p.Phe731Cys |
| 2:25240432:A:G | NA | missense | c.2192T > C | p.Phe731Ser |
| 2:25240432:A:T | NA | missense | c.2192T > A | p.Phe731Tyr |
| 2:25240432:AAG: | NA | frameshift | c.2190_2191delCT | p.Phe731fs |
| A | | | | |
| 2:25240433:A:AT | NA | frameshift | c.2190_2191insA | p.Phe731fs |
| 2:25240433:A:C | NA | missense | c.2191T > G | p.Phe731Val |
| 2:25240433:A:G | rs143019657 | missense | c.2191T > C | p.Phe731Leu |
| 2:25240433:A:T | NA | missense | c.2191T > A | p.Phe731Ile |
| 2:25240433:AG:A | NA | frameshift | c.2190delC | p.Phe731fs |
| 2:25240433:AGA | NA | frameshift | c.2186_2190delGG | p.Arg729fs |
| GCC:A | | | CTC | |
| 2:25240434:G:GA | NA | frameshift | c.2186_2189dupG | p.Phe731fs |
| GCC | | | GCT | |
| 2:25240434:GA:G | NA | frameshift | c.2189delT | p.Leu730fs |
| 2:25240434:GAG | NA | frameshift | c.2182_2189delGG | p.Gly728fs |
| CCGGCCTG | | | CCGGCT | |
| 2:25240435:A:AG | NA | frameshift | c.2187_2188dupGC | p.Leu730fs |
| C | | | | |
| 2:25240435:A:G | rs749126333 | missense | c.2189T > C | p.Leu730Pro |
| 2:25240435:AG:A | NA | frameshift | c.2188delC | p.Leu730fs |
| 2:25240435:AGCC | NA | frameshift | c.2179_2188delAC | p.Thr727fs |
| GGCCAGT:A | | | TGGCCGGC | |
| 2:25240437:C:CC | NA | inframe_indel | c.2186_2187insAG | p.Arg729dup |
| CT | | | G | |
| 2:25240437:C:CC | NA | frameshift | c.2174- | p.Leu730fs |
| GGCCAGTGCCCTC | | | 9_2186dupACCTCT | |
| TGAGAGGT | | | CAGAGGGCACTGG | |
| | | | CCG | |
| 2:25240437:CCG: | NA | frameshift | c.2185_2186delCG | p.Arg729fs |
| C | | | | |
| 2:25240438:C:A | NA | missense | c.2186G > T | p.Arg729Leu |
| 2:25240438:C:CG | NA | frameshift | c.2181_2185dupTG | p.Arg729fs |
| GCCA | | | GCC | |
| 2:25240438:C:CG | NA | frameshift | c.2174- | p.Arg729fs |
| GCCAGTGCCCTCT | | | 4_2185dupTCAGA | |
| GA | | | GGGCACTGGCC | |
| 2:25240438:C:G | NA | missense | c.2186G > C | p.Arg729Pro |
| 2:25240438:C:T | rs757211277 | missense | c.2186G > A | p.Arg729Gln |
| 2:25240438:CG:C | NA | frameshift | c.2185delC | p.Arg729fs |
| 2:25240439:G:A | rs200018028 | missense | c.2185C > T | p.Arg729Trp |
| 2:25240439:G:C | rs200018028 | missense | c.2185C > G | p.Arg729Gly |
| 2:25240439:GGC | NA | frameshift | c.2181_2184delTG | p.Arg729fs |
| CA:G | | | GC | |
| 2:25240440:G:GC | NA | frameshift | c.2183dupG | p.Arg729fs |
| 2:25240440:GC:G | NA | frameshift | c.2183delG | p.Gly728fs |
| 2:25240441:C:A | NA | missense | c.2183G > T | p.Gly728Val |
| 2:25240441:C:CA | NA | frameshift | c.2182_2183insT | p.Gly728fs |
| 2:25240441:C:T | NA | missense | c.2183G > A | p.Gly728Asp |
| 2:25240442:C:A | NA | missense | c.2182G > T | p.Gly728Cys |
| 2:25240442:C:G | NA | missense | c.2182G > C | p.Gly728Arg |
| 2:25240442:C:T | NA | missense | c.2182G > A | p.Gly728Ser |
| 2:25240443:AG:A | NA | frameshift | c.2180delC | p.Thr727fs |
| 2:25240444:GT:G | NA | frameshift | c.2179delA | p.Thr727fs |
| 2:25240445:TG:T | NA | frameshift | c.2178delC | p.Thr727fs |
| 2:25240446:GC:G | NA | frameshift | c.2177delG | p.Gly726fs |
| 2:25240446:GCCC | NA | frameshift | c.2174- | p.Glu725fs |
| TCTGAGAGGTC:G | | | 10_2177delGACCT | |
| | | | CTCAGAGGG | |
| 2:25240447:C:A | rs1432383727 | missense | c.2177G > T | p.Gly726Val |
| 2:25240447:C:T | NA | missense | c.2177G > A | p.Gly726Asp |
| 2:25240448:C:A | NA | missense | c.2176G > T | p.Gly726Cys |
| 2:25240448:C:G | NA | missense | c.2176G > C | p.Gly726Arg |
| 2:25240448:CCT: | rs1175429748 | frameshift | c.2174_2175delAG | p.Glu725fs |
| C | | | | |
| 2:25240448:CCTC | NA | frameshift | c.2174- | p.Glu725fs |
| T:C | | | 2_2175delAGAG | |
| 2:25240449:CT:C | NA | frameshift | c.2174delA | p.Glu725fs |
| 2:25240451:C:A | NA | splice_acceptor | c.2174-1G > T | |
| 2:25240451:C:G | NA | splice_acceptor | c.2174-1G > C | |
| 2:25240451:C:T | rs1262354256 | splice_acceptor | c.2174-1G > A | |
| 2:25240452:T:A | NA | splice_acceptor | c.2174-2A > T | |
| 2:25240452:T:C | rs772010891 | splice_acceptor | c.2174-2A > G | |
| 2:25240452:T:G | rs772010891 | splice_acceptor | c.2174-2A > C | |
| 2:25240631:GGT | NA | frameshift | c.2173_2173+8del | p.Glu725fs |
| ACCTACC:G | | | GGTAGGTAC | |
| 2:25240633:TACC | NA | frameshift | c.2170_2173+6delT | p.Tyr724fs |
| TACCGTA:T | | | ACGGTAGGT | |
| 2:25240637:T:TA | NA | splice_donor | c.2173+2dupT | |
| 2:25240638:A:G | NA | splice_donor | c.2173+2T > C | |
| 2:25240638:AC:A | NA | splice_donor | c.2173+1delG | |
| 2:25240639:C:A | NA | splice_donor | c.2173+1G > T | |
| 2:25240639:C:G | NA | splice_donor | c.2173+1G > C | |
| 2:25240639:C:T | rs763716866 | splice_donor | c.2173+1G > A | |
| 2:25240640:C:A | | stop_gained | c.2173G > T | p.Glu725* |
| 2:25240640:C:CC | NA | stop_gained | c.2172_2173insTA | p.Tyr724_Glu725 |
| TA | | | G | insTer |
| 2:25240640:C:CG | NA | frameshift | c.2171_2172dupAC | p.Glu725fs |
| T | | | | |
| 2:25240641:G:C | NA | stop_gained | c.2172C > G | p.Tyr724* |
| 2:25240641:G:T | NA | stop_gained | c.2172C > A | p.Tyr724* |
| 2:25240642:T:C | rs1330225644 | missense | c.2171A > G | p.Tyr724Cys |
| 2:25240642:T:TCT | NA | stop_gained | c.2170_2171insGA | p.Tyr724delinsTer |
| C | | | G | Asp |
| 2:25240644:G:GA | NA | frameshift | c.2168dupT | p.Tyr724fs |
| 2:25240644:GA:G | NA | frameshift | c.2168delT | p.Leu723fs |
| 2:25240645:A:T | NA | missense | c.2168T > A | p.Leu723His |
| 2:25240645:AGG: | NA | frameshift | c.2166_2167delCC | p.Tyr724fs |
| A | | | | |
| 2:25240646:G:T | NA | missense | c.2167C > A | p.Leu723Ile |
| 2:25240647:GC:G | NA | frameshift | c.2165delG | p.Gly722fs |
| 2:25240647:GCC: | NA | frameshift | c.2164_2165delGG | p.Gly722fs |
| G | | | | |
| 2:25240648:C:T | NA | missense | c.2165G > A | p.Gly722Asp |
| 2:25240650:C:CTT | NA | frameshift | c.2161_2162dupAA | p.Gly722fs |
| 2:25240651:T:A | NA | missense | c.2162A > T | p.Lys721Met |
| 2:25240652:T:A | NA | stop_gained | c.2161A > T | p.Lys721* |
| 2:25240652:T:C | NA | missense | c.2161A > G | p.Lys721Glu |
| 2:25240652:T:TCC | NA | frameshift | c.2160_2161insTC | p.Lys721fs |
| GA | | | GG | |
| 2:25240653:GC:G | NA | frameshift | c.2159delG | p.Arg720fs |
| 2:25240654:C:A | rs1272076221 | missense | c.2159G > T | p.Arg720Leu |
| 2:25240654:C:G | NA | missense | c.2159G > C | p.Arg720Pro |
| 2:25240654:C:T | NA | missense | c.2159G > A | p.Arg720His |
| 2:25240654:CG:C | NA | frameshift | c.2158delC | p.Arg720fs |
| 2:25240654:CGA | NA | frameshift | c.2152_2158delCC | p.Pro718fs |
| GCAGG:C | | | TGCTC | |
| 2:25240655:G:A | rs1197133406 | missense | c.2158C > T | p.Arg720Cys |
| 2:25240655:G:C | NA | missense | c.2158C > G | p.Arg720Gly |
| 2:25240655:G:T | NA | missense | c.2158C > A | p.Arg720Ser |
| 2:25240657:G:GT | NA | frameshift | c.2155_2156insA | p.Ala719fs |
| 2:25240657:GCA | NA | frameshift | c.2149_2155delAA | p.Asn717fs |
| GGGTT:G | | | CCCTG | |
| 2:25240658:C:G | NA | missense | c.2155G > C | p.Ala719Pro |
| 2:25240658:C:T | NA | missense | c.2155G > A | p.Ala719Thr |
| 2:25240658:CAG | NA | frameshift | c.2139_2154delCT | p.Ser714fs |
| GGTTGACGATGG | | | CCATCGTCAACCCT | |
| AG:C | | | | |
| 2:25240659:AG:A | NA | frameshift | c.2153delC | p.Pro718fs |
| 2:25240660:G:A | NA | missense | c.2153C > T | p.Pro718Leu |
| 2:25240660:G:GG | NA | frameshift | c.2143_2152dupAT | p.Pro718fs |
| GTTGACGAT | | | CGTCAACC | |
| 2:25240661:G:A | NA | missense | c.2152C > T | p.Pro718Ser |
| 2:25240662:G:GT | NA | frameshift | c.2150dupA | p.Asn717fs |
| 2:25240662:G:GT | NA | frameshift | c.2149_2150dupAA | p.Asn717fs |
| T | | | | |
| 2:25240662:GT:G | NA | frameshift | c.2150delA | p.Asn717fs |
| 2:25240663:T:A | NA | missense | c.2150A > T | p.Asn717Ile |
| 2:25240663:T:C | NA | missense | c.2150A > G | p.Asn717Ser |
| 2:25240663:T:TT | NA | frameshift | c.2148_2149dupCA | p.Asn717fs |
| G | | | | |
| 2:25240664:TGA: | NA | frameshift | c.2147_2148delTC | p.Va1716fs |
| T | | | | |
| 2:25240666:A:C | NA | missense | c.2147T > G | p.Va1716Gly |
| 2:25240666:A:T | rs778857953 | missense | c.2147T > A | p.Va1716Asp |
| 2:25240666:AC:A | NA | frameshift | c.2146delG | p.Va1716fs |
| 2:25240667:C:A | rs1418039680 | missense | c.2146G > T | p.Va1716Phe |
| 2:25240667:C:CA | NA | frameshift | c.2145_2146insT | p.Va1716fs |
| 2:25240667:C:T | rs1418039680 | missense | c.2146G > A | p.Va1716Ile |
| 2:25240667:CG:C | NA | frameshift | c.2145delC | p.Ile715fs |
| 2:25240668:GAT: | NA | frameshift | c.2143_2144delAT | p.Ile715fs |
| G | | | | |
| 2:25240668:GAT | NA | frameshift | c.2134_2144delGA | p.Asp712fs |
| GGAGAGGTC:G | | | CCTCTCCAT | |
| 2:25240669:ATG | NA | frameshift | c.2136_2143delCC | p.Leu713fs |
| GAGAGG:A | | | TCTCCA | |
| 2:25240670:T:TG | rs1179539918 | frameshift | c.2142dupC | p.Ile715fs |
| 2:25240670:TG:T | NA | frameshift | c.2142delC | p.Ile715fs |
| 2:25240670:TGG | NA | frameshift | c.2138_2142delTCT | p.Leu713fs |
| AGA:T | | | CC | |
| 2:25240671:G:GA | NA | frameshift | c.2141_2142insT | p.Ile715fs |
| 2:25240671:G:GG | NA | frameshift | c.2140_2141dupTC | p.Ile715fs |
| A | | | | |
| 2:25240671:G:GG | NA | frameshift | c.2138_2141dupTC | p.Ile715fs |
| AGA | | | TC | |
| 2:25240671:GGA: | rs1281903798 | frameshift | c.2140_2141delTC | p.Ser714fs |
| G | | | | |
| 2:25240672:G:A | NA | missense | c.2141C > T | p.Ser714Phe |
| 2:25240672:G:C | rs367909007 | missense | c.2141C > G | p.Ser714Cys |
| 2:25240672:G:GA | NA | frameshift | c.2140dupT | p.Ser714fs |
| 2:25240672:G:T | NA | missense | c.2141C > A | p.Ser714Tyr |
| 2:25240674:GAG | NA | frameshift | c.2134_2138delGA | p.Asp712fs |
| GTCTG | | | CCT | |
| 2:25240675:A:AT | NA | frameshift | c.2137_2138insA | p.Leu713fs |
| 2:25240675:AG:A | rs777214520 | frameshift | c.2137delC | p.Leu713fs |
| 2:25240675:AGG | NA | frameshift | c.2127_2137delCT | p.Cys710fs |
| TCATTGCAG:A | | | GCAATGACC | |
| 2:25240676:G:A | rs780006700 | missense | c.2137C > T | p.Leu713Phe |
| 2:25240676:G:C | NA | missense | c.2137C > G | p.Leu713Val |
| 2:25240676:GGT: | NA | frameshift | c.2135_2136delAC | p.Asp712fs |
| G | | | | |
| 2:25240677:G:GT | NA | frameshift | c.2135dupA | p.Asp712fs |
| 2:25240677:G:GT | NA | frameshift | c.2132_2135dupAT | p.Asp712fs |
| CAT | | | GA | |
| 2:25240677:G:T | NA | missense | c.2136C > A | p.Asp712Glu |
| 2:25240677:GT:G | NA | frameshift | c.2135delA | p.Asp712fs |
| 2:25240678:T:A | NA | missense | c.2135A > T | p.Asp712Val |
| 2:25240678:T:C | NA | missense | c.2135A > G | p.Asp712Gly |
| 2:25240678:T:G | NA | missense | c.2135A > C | p.Asp712Ala |
| 2:25240678:TC:T | NA | frameshift | c.2134delG | p.Asp712fs |
| 2:25240678:TCAT | NA | frameshift | c.2118_2134delGG | p.Gly707fs |
| TGCAGGGACTGC | | | GCAGTCCCTGCAAT | |
| CC:T | | | G | |
| 2:25240680:A:AT | NA | frameshift | c.2132dupA | p.Asn711fs |
| 2:25240682:TG:T | NA | frameshift | c.2130delC | p.Cys710fs |
| 2:25240683:G:T | NA | stop_gained | c.2130C > A | p.Cys710* |
| 2:25240683:GCA | NA | frameshift | c.2117_2129delGG | p.Gly706fs |
| GGGACTGCCCC:G | | | GGCAGTCCCTG | |
| 2:25240684:C:G | rs1444323322 | missense | c.2129G > C | p.Cys710Ser |
| 2:25240684:C:T | NA | missense | c.2129G > A | p.Cys710Tyr |
| 2:25240684:CA:C | NA | frameshift | c.2128delT | p.Cys710fs |
| 2:25240685:A:G | NA | missense | c.2128T > C | p.Cys710Arg |
| 2:25240685:A:T | rs746857175 | missense | c.2128T > A | p.Cys710Ser |
| 2:25240685:AG:A | NA | frameshift | c.2127delC | p.Cys710fs |
| 2:25240687:G:A | NA | missense | c.2126C > T | p.Pro709Leu |
| 2:25240687:G:GA | NA | frameshift | c.2125_2126insT | p.Pro709fs |
| 2:25240687:GGA | NA | frameshift | c.2112_2125delGA | p.Ile705fs |
| CTGCCCCCAATCTG | | | TTGGGGGCAGTC | |
| 2:25240688:GA:G | NA | frameshift | c.2124delT | p.Cys710fs |
| 2:25240689:AC:A | NA | frameshift | c.2123delG | p.Ser708fs |
| 2:25240689:ACTG | NA | inframe_indel | c.2094_2123delGG | p.Trp698_Ser708 |
| CCCCCAATCACCA | | | GCCCATTCGATCTG | delinsCys |
| GATCGAATGGGC | | | GTGATTGGGGGCA | |
| CC:A | | | G | |
| 2:25240690:C:A | NA | missense | c.2123G > T | p.Ser708Ile |
| 2:25240690:C:T | NA | missense | c.2123G > A | p.Ser708Asn |
| 2:25240690:CT:C | NA | frameshift | c.2122delA | p.Ser708fs |
| 2:25240690:CTG: | NA | frameshift | c.2121_2122delCA | p.Pro709fs |
| C | | | | |
| 2:25240691:TG:T | NA | frameshift | c.2121delC | p.Ser708fs |
| 2:25240692:G:GC | rs1402117804 | frameshift | c.2120dupG | p.Ser708fs |
| 2:25240692:GC:G | rs762350913 | frameshift | c.2120delG | p.Gly707fs |
| 2:25240693:C:A | NA | missense | c.2120G > T | p.Gly707Val |
| 2:25240693:C:T | rs927337009 | missense | c.2120G > A | p.Gly707Asp |
| 2:25240694:C:A | NA | missense | c.2119G > T | p.Gly707Cys |
| 2:25240694:C:G | NA | missense | c.2119G > C | p.Gly707Arg |
| 2:25240694:C:T | NA | missense | c.2119G > A | p.Gly707Ser |
| 2:25240695:CCCA | NA | frameshift | c.2090_2117delAG | p.Glu697fs |
| ATCACCAGATCGA | | | TGGGGCCCATTCGA | |
| ATGGGCCCCACT: | | | TCTGGTGATTGG | |
| C | | | | |
| 2:25240696:C:A | NA | missense | c.2117G > T | p.Gly706Val |
| 2:25240696:C:T | rs777898555 | missense | c.2117G > A | p.Gly706Glu |
| 2:25240697:C:A | rs749365376 | missense | c.2116G > T | p.Gly706Trp |
| 2:25240697:c.G | NA | missense | c.2116G > C | p.Gly706Arg |
| 2:25240697:CTT | NA | missense | c.2116G > A | p.Gly706Arg |
| 2:25240697:CA:C | NA | frameshift | c.2115delT | p.Ile705fs |
| 2:25240698:AATC | NA | frameshift | c.2107_2114delCT | p.Leu703fs |
| ACCAG:A | | | GGTGAT | |
| 2:25240699:A:C | rs777037011 | missense | c.2114T > G | p.Ile705Ser |
| 2:25240699:A:G | rs777037011 | missense | c.2114T > C | p.Ile705Thr |
| 2:25240699:A:T | NA | missense | c.2114T > A | p.Ile705Asn |
| 2:25240699:AT:A | rs1411778215 | frameshift | c.2113delA | p.Ile705fs |
| 2:25240700:T:A | rs1291851173 | missense | c.2113A > T | p.Ile705Phe |
| 2:25240700:T:C | NA | missense | c.2113A > G | p.Ile705Val |
| 2:25240700:T:TC | NA | frameshift | c.2111_2112dupTG | p.Ile705fs |
| A | | | | |
| 2:25240700:TC:T | NA | frameshift | c.2112delG | p.Ile705fs |
| 2:25240700:TCA: | NA | frameshift | c.2111_2112delTG | p.Va1704fs |
| T | | | | |
| 2:25240701:CA:C | NA | frameshift | c.2111delT | p.Va1704fs |
| 2:25240702:A:C | NA | missense | c.2111T > G | p.Va1704Gly |
| 2:25240702:A:G | rs1165074698 | missense | c.2111T > C | p.Va1704Ala |
| 2:25240702:A:T | NA | missense | c.2111T > A | p.Va1704Glu |
| 2:25240702:AC:A | rs1454822561 | frameshift | c.2110delG | p.Va1704fs |
| 2:25240704:CAG: | NA | frameshift | c.2107_2108delCT | p.Leu703fs |
| C | | | | |
| 2:25240705:A:AG | NA | frameshift | c.2107dupC | p.Leu703fs |
| 2:25240705:A:C | NA | missense | c.2108T > G | p.Leu703Arg |
| 2:25240705:A:G | NA | missense | c.2108T > C | p.Leu703Pro |
| 2:25240705:A:T | NA | missense | c.2108T > A | p.Leu703Gln |
| 2:25240705:AG:A | rs765733093 | frameshift | c.2107delC | p.Leu703fs |
| 2:25240706:G:C | NA | missense | c.2107C > G | p.Leu703Val |
| 2:25240706:GAT: | NA | frameshift | c.2105_2106delAT | p.Asp702fs |
| G | | | | |
| 2:25240707:A:C | NA | missense | c.2106T > G | p.Asp702Glu |
| 2:25240707:A:T | NA | missense | c.2106T > A | p.Asp702Glu |
| 2:25240707:AT:A | NA | frameshift | c.2105delA | p.Asp702fs |
| 2:25240708:T:A | NA | missense | c.2105A > T | p.Asp702Val |
| 2:25240708:T:C | rs1400330086 | missense | c.2105A > G | p.Asp702Gly |
| 2:25240708:T:G | NA | missense | c.2105A > C | p.Asp702Ala |
| 2:25240708:TC:T | NA | frameshift | c.2104delG | p.Asp702fs |
| 2:25240708:TCGA | NA | frameshift | c.2097_2104delCC | p.Pro700fs |
| ATGGG:T | | | CATTCG | |
| 2:25240709:C:A | rs770938712 | missense | c.2104G > T | p.Asp702Tyr |
| 2:25240709:C:G | NA | missense | c.2104G > C | p.Asp702His |
| 2:25240709:C:T | rs770938712 | missense | c.2104G > A | p.Asp702Asn |
| 2:25240710:G:C | NA | missense | c.2103C > G | p.Phe701Leu |
| 2:25240710:G:T | NA | missense | c.2103C > A | p.Phe701Leu |
| 2:25240710:GA:G | NA | frameshift | c.2102delT | p.Phe701fs |
| 2:25240711:A:C | NA | missense | c.2102T > G | p.Phe701Cys |
| 2:25240711:A:G | NA | missense | c.2102T > C | p.Phe701Ser |
| 2:25240711:A:T | NA | missense | c.2102T > A | p.Phe701Tyr |
| 2:25240712:A:C | rs760042734 | missense | c.2101T > G | p.Phe701Val |
| 2:25240712:A:G | NA | missense | c.2101T > C | p.Phe701Leu |
| 2:25240712:AT:A | NA | frameshift | c.2100delA | p.Phe701fs |
| 2:25240712:ATG | NA | frameshift | c.2088_2100delGG | p.Gln696fs |
| GGCCCCACTCC:A | | | AGTGGGGCCCA | |
| 2:25240713:TG:T | rs773340419 | frameshift | c.2099delC | p.Pro700fs |
| 2:25240714:G:A | rs772368909 | missense | c.2099C > T | p.Pro700Leu |
| 2:25240714:G:C | NA | missense | c.2099C > G | p.Pro700Arg |
| 2:25240714:G:T | NA | missense | c.2099C > A | p.Pro700Gln |
| 2:25240715:G:A | rs775823075 | missense | c.2098C > T | p.Pro700Ser |
| 2:25240715:G:C | rs775823075 | missense | c.2098C > G | p.Pro700Ala |
| 2:25240715:G:T | rs775823075 | missense | c.2098C > A | p.Pro700Thr |
| 2:25240716:G:GA | NA | frameshift | c.2096_2097insT | p.Phe701fs |
| 2:25240716:G:GC | rs762965546 | frameshift | c.2096dupG | p.Phe701fs |
| 2:25240716:G:GC | NA | frameshift | c.2095_2096dupG | p.Pro700fs |
| C | | | G | |
| 2:25240716:G:GC | NA | frameshift | c.2092_2096dupTG | p.Pro700fs |
| CCCA | | | GGG | |
| 2:25240716:G:GC | NA | frameshift | c.2090_2096dupA | p.Pro700fs |
| CCCACT | | | GTGGGG | |
| 2:25240716:Gc.G | | frameshift | c.2096delG | p.Gly699fs |
| 2:25240716:GCCC | NA | frameshift | c.2092_2096delTG | p.Trp698fs |
| CA:G | | | GGG | |
| 2:25240716:GCCC | NA | frameshift | c.2090_2096delAG | p.Glu697fs |
| CACT:G | | | TGGGG | |
| 2:25240717:C:A | NA | missense | c.2096G > T | p.Gly699Val |
| 2:25240717:C:T | rs761064473 | missense | c.2096G > A | p.Gly699Asp |
| 2:25240718:C:A | NA | missense | c.2095G > T | p.Gly699Cys |
| 2:25240718:C:G | NA | missense | c.2095G > C | p.Gly699Arg |
| 2:25240718:C:T | rs763776241 | missense | c.2095G > A | p.Gly699Ser |
| 2:25240718:CCCA | NA | frameshift | c.2090_2094delAG | p.Glu697fs |
| CT:C | | | TGG | |
| 2:25240719:C:A | NA | missense | c.2094G > T | p.Trp698Cys |
| 2:25240719:C:T | rs753452266 | stop_gained | c.2094G > A | p.Trp698* |
| 2:25240720:C:G | NA | missense | c.2093G > C | p.Trp698Ser |
| 2:25240720:C:T | rs1005359774 | stop_gained | c.2093G > A | p.Trp698* |
| 2:25240720:CA:C | NA | frameshift | c.2092delT | p.Trp698fs |
| 2:25240720:CACT: | NA | inframe_indel | c.2090_2092delAG | p.Glu697_Trp698 |
| C | | | T | delinsGly |
| 2:25240721:A:G | NA | missense | c.2092T > C | p.Trp698Arg |
| 2:25240721:A:T | NA | missense | c.2092T > A | p.Trp698Arg |
| 2:25240721:AC:A | NA | frameshift | c.2091delG | p.Glu697fs |
| 2:25240723:T:TC | NA | frameshift | c.2089dupG | p.Glu697fs |
| 2:25240723:TCC:T | NA | frameshift | c.2088_2089delGG | p.Glu697fs |
| 2:25240724:C:A | rs761343150 | stop_gained | c.2089G > T | p.Glu697* |
| 2:25240726:TG:T | rs766594867 | frameshift | c.2086delC | p.Gln696fs |
| 2:25240726:TGG: | NA | frameshift | c.2085_2086delCC | p.Gln696fs |
| T | | | | |
| 2:25240726:TGG | NA | frameshift | c.2083- | p.Ile695fs |
| ATCTGGGAGGAT | | | 14_2086delCTTTAT | |
| AAAG:T | | | CCTCCCAGATCC | |
| 2:25240727:G:A | rs750325978 | stop_gained | c.2086C > T | p.Gln696* |
| 2:25240727:G:T | NA | missense | c.2086C > A | p.Gln696Lys |
| 2:25240729:A:T | rs780206885 | missense | c.2084T > A | p.Ile695Asn |
| 2:25240731:C:A | NA | splice_acceptor | c.2083-1G > T | |
| 2:25240731:C:G | NA | splice_acceptor | c.2083-1G > C | |
| 2:25240731:C:T | NA | splice_acceptor | c.2083-1G > A | |
| 2:25240732:T:A | NA | splice_acceptor | c.2083-2A > T | |
| 2:25240732:T:C | rs761987159 | splice_acceptor | c.2083-2A > G | |
| 2:25241553:TGG | NA | splice_donor | c.2059_2082+8del | p.Va1687_His694 |
| ACATACATGCTTC | | | GTCCGCAGCGTCAC | del |
| TGTGTGACGCTGC | | | ACAGAAGCATGTAT | |
| GGAC:T | | | GTCC | |
| 2:25241559:T:TA | rs751693865 | splice_donor | c.2082+2dupT | |
| 2:25241559:TACA | NA | frameshift | c.2070_2082+2del | p.Thr691fs |
| TGCTTCTGTGTG:T | | | CACACAGAAGCATG | |
| | | | T | |
| 2:25241560:A:C | rs1196735995 | splice_donor | c.2082+2T > G | |
| 2:25241560:A:G | rs1196735995 | splice_donor | c.2082+2T > C | |
| 2:25241560:A:T | NA | splice_donor | c.2082+2T > A | |
| 2:25241561:C:A | NA | splice_donor | c.2082+lG > T | |
| 2:25241561:C:CA | NA | frameshift | c.2082dupT | p.Ile695fs |
| 2:25241561:C:CA | NA | frameshift | c.2078_2082dupA | p.Ile695fs |
| TGCT | | | GCAT | |
| 2:25241561:C:G | NA | splice_donor | c.2082+1G > C | |
| 2:25241561:C:T | rs766397390 | splice_donor | c.2082+1G > A | |
| 2:25241561:CATG | NA | frameshift | c.2075_2082delAG | p.Gln692fs |
| CTTCT:C | | | AAGCAT | |
| 2:25241562:AT:A | NA | frameshift | c.2081delA | p.His694fs |
| 2:25241563:T:C | NA | missense | c.2081A > G | p.His694Arg |
| 2:25241563:T:G | NA | missense | c.2081A > C | p.His694Pro |
| 2:25241563:TG:T | NA | frameshift | c.2080delC | p.His694fs |
| 2:25241564:G:A | NA | missense | c.2080C > T | p.His694Tyr |
| 2:25241564:GCTT | NA | frameshift | c.2073_2079delAC | p.Gln692fs |
| CTGT:G | | | AGAAG | |
| 2:25241565:C:CTT | NA | inframe_indel | c.2078_2079insTA | p.Gln692_Lys693 |
| A | | | A | insAsn |
| 2:25241565:C:G | NA | missense | c.2079G > C | p.Lys693Asn |
| 2:25241565:CT:C | NA | frameshift | c.2078delA | p.Lys693fs |
| 2:25241566:T:TTC | NA | frameshift | c.2076_2077dupG | p.Lys693fs |
| | | | A | |
| 2:25241566:TTC:T | NA | frameshift | c.2076_2077delGA | p.Lys693fs |
| 2:25241567:T:A | rs1365278000 | stop_gained | c.2077A > T | p.Lys693* |
| 2:25241568:C:CT | NA | frameshift | c.2075dupA | p.Lys693fs |
| 2:25241568:CTG: | NA | frameshift | c.2074_2075delCA | p.Gln692fs |
| C | | | | |
| 2:25241569:TGTG | NA | inframe_indel | c.2063_2074delGC | p.Arg688_Thr691 |
| TGACGCTGC:T | | | AGCGTCACAC | del |
| 2:25241570:G:A | rs1278018793 | stop_gained | c.2074C > T | p.Gln692* |
| 2:25241570:G:GT | NA | frameshift | c.2073dupA | p.Gln692fs |
| 2:25241570:GT:G | NA | frameshift | c.2073delA | p.Gln692fs |
| 2:25241571:T:TG | NA | inframe_indel | c.2070_2072dupCA | p.Thr691dup |
| TG | | | C | |
| 2:25241571:TG:T | NA | frameshift | c.2072delC | p.Thr691fs |
| 2:25241572:G:A | rs1193025338 | missense | c.2072C > T | p.Thr691Ile |
| 2:25241572:G:GT | NA | frameshift | c.2071dupA | p.Thr691fs |
| 2:25241572:GT:G | NA | frameshift | c.2071delA | p.Thr691fs |
| 2:25241573:T:G | NA | missense | c.2071A > C | p.Thr691Pro |
| 2:25241573:T:TA | NA | frameshift | c.2070_2071insT | p.Thr691fs |
| 2:25241574:GA:G | NA | frameshift | c.2069delT | p.Va1690fs |
| 2:25241575:A:AC | NA | frameshift | c.2064_2068dupCA | p.Va1690fs |
| GCTG | | | GCG | |
| 2:25241575:A:C | NA | missense | c.2069T > G | p.Va1690Gly |
| 2:25241575:A:G | NA | missense | c.2069T > C | p.Va1690Ala |
| 2:25241575:A:T | NA | missense | c.2069T > A | p.Va1690Asp |
| 2:25241575:AC:A | NA | frameshift | c.2068delG | p.Va1690fs |
| 2:25241576:C:A | NA | missense | c.2068G > T | p.Va1690Phe |
| 2:25241576:C:T | rs768899154 | missense | c.2068G > A | p.Va1690Ile |
| 2:25241576:CG:C | NA | frameshift | c.2067delC | p.Ser689fs |
| 2:25241577:G:GC | NA | frameshift | c.2041_2066dupAT | p.Ser689fs |
| TGCGGACGTCCCC | | | CATGTACGTCGGGG | |
| GACGTACATGAT | | | ACGTCCGCAG | |
| 2:25241579:TG:T | NA | frameshift | c.2064delC | p.Ser689fs |
| 2:25241580:GC:G | NA | frameshift | c.2063delG | p.Arg688fs |
| 2:25241580:GCG | NA | frameshift | c.2054_2063delGG | p.Gly685fs |
| GACGTCCC:G | | | GACGTCCG | |
| 2:25241581:C:A | NA | missense | c.2063G > T | p.Arg688Leu |
| 2:25241581:C:G | NA | missense | c.2063G > C | p.Arg688Pro |
| 2:25241581:C:T | rs369713081 | missense | c.2063G > A | p.Arg688His |
| 2:25241581:CG:C | NA | frameshift | c.2062delC | p.Arg688fs |
| 2:25241582:G:A | rs1484795800 | missense | c.2062C > T | p.Arg688Cys |
| 2:25241582:G:C | rs1484795800 | missense | c.2062C > G | p.Arg688Gly |
| 2:25241582:G:T | NA | missense | c.2062C > A | p.Arg688Ser |
| 2:25241584:A:C | NA | missense | c.2060T > G | p.Va1687Gly |
| 2:25241584:A:G | NA | missense | c.2060T > C | p.Va1687Ala |
| 2:25241584:A:T | NA | missense | c.2060T > A | p.Va1687Asp |
| 2:25241585:C:A | NA | missense | c.2059G > T | p.Va1687Phe |
| 2:25241585:c.G | NA | missense | c.2059G > C | p.Va1687Leu |
| 2:25241586:G:C | NA | missense | c.2058C > G | p.Asp686Glu |
| 2:25241586:G:GT | NA | frameshift | c.2057_2058insTG | p.Va1687fs |
| CCCCGACGTACAT | | | ATCATGTACGTCGG | |
| GATCA | | | GGA | |
| 2:25241586:GT:G | NA | frameshift | c.2057delA | p.Asp686fs |
| 2:25241587:T:A | rs754764419 | missense | c.2057A > T | p.Asp686Val |
| 2:25241587:T:C | rs754764419 | missense | c.2057A > G | p.Asp686Gly |
| 2:25241587:T:G | NA | missense | c.2057A > C | p.Asp686Ala |
| 2:25241587:T:TC | NA | frameshift | c.2056dupG | p.Asp686fs |
| 2:25241587:TC:T | NA | frameshift | c.2056delG | p.Asp686fs |
| 2:25241587:TCC:T | rs1344775606 | frameshift | c.2055_2056delGG | p.Asp686fs |
| 2:25241587:TCCC | NA | frameshift | c.2046_2056delGT | p.Met682fs |
| CGACGTAC:T | | | ACGTCGGGG | |
| 2:25241588:C:A | rs767224028 | missense | c.2056G > T | p.Asp686Tyr |
| 2:25241588:C:G | NA | missense | c.2056G > C | p.Asp686His |
| 2:25241588:C:T | NA | missense | c.2056G > A | p.Asp686Asn |
| 2:25241589:CCCG | NA | frameshift | c.2038_2054delAA | p.Lys680fs |
| ACGTACATGATCT | | | GATCATGTACGTCG | |
| T:C | | | G | |
| 2:25241590:C:A | NA | missense | c.2054G > T | p.Gly685Val |
| 2:25241590:C:G | rs754037033 | missense | c.2054G > C | p.Gly685Ala |
| 2:25241590:C:T | rs754037033 | missense | c.2054G > A | p.Gly685Glu |
| 2:25241590:CCGA | NA | frameshift | c.2049_2053delCG | p.Tyr683fs |
| CG:C | | | TCG | |
| 2:25241591:C:A | rs779176507 | missense | c.2053G > T | p.Gly685Trp |
| 2:25241591:C:G | NA | missense | c.2053G > C | p.Gly685Arg |
| 2:25241591:C:T | rs779176507 | missense | c.2053G > A | p.Gly685Arg |
| 2:25241591:CG:C | NA | frameshift | c.2052delC | p.Asp686fs |
| 2:25241591:CGAC | NA | frameshift | c.2049_2052delCG | p.Tyr683fs |
| G:C | | | TC | |
| 2:25241591:CGAC | NA | frameshift | c.2048_2052delAC | p.Tyr683fs |
| GT:C | | | GTC | |
| 2:25241592:GA:G | NA | frameshift | c.2051delT | p.Va1684fs |
| 2:25241592:GAC | NA | inframe_indel | c.2046_2051delGT | p.Met682_Va1684 |
| GTAC:G | | | ACGT | delinsIle |
| 2:25241593:A:C | NA | missense | c.2051T > G | p.Va1684Gly |
| 2:25241593:A:T | NA | missense | c.2051T > A | p.Va1684Asp |
| 2:25241593:ACGT | NA | frameshift | c.2035_2050delGG | p.Gly679fs |
| ACATGATCTTCCC: | | | GAAGATCATGTACG | |
| A | | | | |
| 2:25241594:C:A | NA | missense | c.2050G > T | p.Va1684Phe |
| 2:25241594:CG:C | NA | frameshift | c.2049delC | p.Tyr683fs |
| 2:25241594:CGTA | NA | frameshift | c.2043_2049delCA | p.Ile681fs |
| CATG:C | | | TGTAC | |
| 2:25241595:G:C | NA | stop_gained | c.2049C > G | p.Tyr683* |
| 2:25241595:G:T | NA | stop_gained | c.2049C > A | p.Tyr683* |
| 2:25241595:GT:G | NA | frameshift | c.2048delA | p.Tyr683fs |
| 2:25241596:T:C | rs780495518 | missense | c.2048A > G | p.Tyr683Cys |
| 2:25241596:T:TA | NA | frameshift | c.2025_2047dupGC | p.Tyr683fs |
| CATGATCTTCCCC | | | GGCACCAGGGGAA | |
| TGGTGCCGC | | | GATCATGT | |
| 2:25241596:TACA | NA | frameshift | c.2043_2047delCA | p.Met682fs |
| TG:T | | | TGT | |
| 2:25241597:A:C | NA | missense | c.2047T > G | p.Tyr683Asp |
| 2:25241597:A:G | NA | missense | c.2047T > C | p.Tyr683His |
| 2:25241597:A:T | NA | missense | c.2047T > A | p.Tyr683Asn |
| 2:25241598:CA:C | NA | frameshift | c.2045delT | p.Met682fs |
| 2:25241598:CAT: | NA | frameshift | c.2044_2045delAT | p.Met682fs |
| C | | | | |
| 2:25241598:CATG: | NA | inframe_indel | c.2043_2045delCA | p.Ile681del |
| C | | | T | |
| 2:25241599:A:AT | NA | frameshift | c.2044dupA | p.Met682fs |
| 2:25241599:A:C | rs1324879320 | missense | c.2045T > G | p.Met682Arg |
| 2:25241599:ATGA | NA | inframe_indel | c.2030_2044delAC | p.His677_Met682 |
| TCTTCCCCTGGT:A | | | CAGGGGAAGATCA | delinsLeu |
| 2:25241600:TG:T | rs1455730245 | frameshift | c.2043delC | p.Met682fs |
| 2:25241600:TGAT | NA | frameshift | c.2024_2043delTG | p.Va1675fs |
| CTTCCCCTGGTGC | | | CGGCACCAGGGGA | |
| CGCA:T | | | AGATC | |
| 2:25241601:G:C | | missense | c.2043C > G | p.Ile681Met |
| 2:25241601:G:GT | NA | frameshift | c.2042_2043insA | p.Met682fs |
| 2:25241602:A:AT | NA | frameshift | c.2017_2041dupG | p.Ile681fs |
| CTTCCCCTGGTGC | | | GCATGGTGCGGCA | |
| CGCACCATGCC | | | CCAGGGGAAGA | |
| 2:25241602:A:G | NA | missense | c.2042T > C | p.Ile681Thr |
| 2:25241602:A:T | rs769006337 | missense | c.2042T > A | p.Ile681Asn |
| 2:25241603:T:A | NA | missense | c.2041A > T | p.Ile681Phe |
| 2:25241604:C:A | NA | missense | c.2040G > T | p.Lys680Asn |
| 2:25241604:CT:C | NA | frameshift | c.2039delA | p.Lys680fs |
| 2:25241605:T:C | NA | missense | c.2039A > G | p.Lys680Arg |
| 2:25241606:T:A | NA | stop_gained | c.2038A > T | p.Lys680* |
| 2:25241606:TC:T | rs1365479526 | frameshift | c.2037delG | p.Lys680fs |
| 2:25241608:C:A | NA | missense | c.2036G > T | p.Gly679Val |
| 2:25241608:C:T | NA | missense | c.2036G > A | p.Gly679Glu |
| 2:25241609:C:A | NA | missense | c.2035G > T | p.Gly679Trp |
| 2:25241610:CT:C | NA | frameshift | c.2033delA | p.Gln678fs |
| 2:25241611:T:TG | NA | frameshift | c.2032dupC | p.Gln678fs |
| 2:25241611:TG:T | NA | frameshift | c.2032delC | p.Gln678fs |
| 2:25241612:G:A | rs1050271318 | stop_gained | c.2032C > T | p.Gln678* |
| 2:25241614:T:C | NA | missense | c.2030A > G | p.His677Arg |
| 2:25241614:T:TG | NA | frameshift | c.2026_2029dupCG | p.His677fs |
| CCG | | | GC | |
| 2:25241615:GCC | NA | frameshift | c.2024_2028delTG | p.Va1675fs |
| GCA:G | | | CGG | |
| 2:25241616:C:CC | NA | frameshift | c.2026_2027dupCG | p.His677fs |
| G | | | | |
| 2:25241617:C:A | rs769539104 | missense | c.2027G > T | p.Arg676Leu |
| 2:25241617:C:T | rs769539104 | missense | c.2027G > A | p.Arg676Gln |
| 2:25241617:CG:C | NA | frameshift | c.2026delC | p.Arg676fs |
| 2:25241618:G:A | rs375399431 | missense | c.2026C > T | p.Arg676Trp |
| 2:25241618:G:C | NA | missense | c.2026C > G | p.Arg676Gly |
| 2:25241618:G:GC | NA | frameshift | c.2025dupG | p.Arg676fs |
| 2:25241618:G:GC | NA | frameshift | c.2021_2025dupTG | p.Arg676fs |
| ACCA | | | GTG | |
| 2:25241618:GCAC | NA | frameshift | c.2000_2025delAG | p.Glu667fs |
| CATGCCCACCGTG | | | GACTCCATCACGGT | |
| ATGGAGTCCT:G | | | GGGCATGGTG | |
| 2:25241619:CA:C | NA | frameshift | c.2024delT | p.Va1675fs |
| 2:25241620:A:AC | NA | frameshift | c.2023dupG | p.Va1675fs |
| 2:25241620:A:C | | missense | c.2024T > G | p.Va1675Gly |
| 2:25241620:A:G | | missense | c.2024T > C | p.Va1675Ala |
| 2:25241620:A:T | NA | missense | c.2024T > A | p.Va1675Glu |
| 2:25241620:AC:A | rs763843749 | frameshift | c.2023delG | p.Va1675fs |
| 2:25241621:C:A | NA | missense | c.2023G > T | p.Va1675Leu |
| 2:25241621:C:G | NA | missense | c.2023G > C | p.Va1675Leu |
| 2:25241621:C:T | rs1025238838 | missense | c.2023G > A | p.Va1675Met |
| 2:25241623:AT:A | NA | frameshift | c.2020delA | p.Met674fs |
| 2:25241623:ATGC | NA | frameshift | c.2014_2020delGT | p.Va1672fs |
| CCAC:A | | | GGGCA | |
| 2:25241624:T:C | rs1306265898 | missense | c.2020A > G | p.Met674Val |
| 2:25241624:TG:T | NA | frameshift | c.2019delC | p.Met674fs |
| 2:25241625:G:GC | NA | frameshift | c.2017_2018dupG | p.Met674fs |
| C | | | G | |
| 2:25241625:G:GC | NA | inframe_indel | c.2016_2018dupG | p.Gly673dup |
| CC | | | GG | |
| 2:25241625:G:GC | NA | frameshift | c.2015_2018dupTG | p.Met674fs |
| CCA | | | GG | |
| 2:25241625:Gc.G | NA | frameshift | c.2018delG | p.Gly673fs |
| 2:25241625:GCCC | NA | frameshift | c.2015_2018delTG | p.Va1672fs |
| A:G | | | GG | |
| 2:25241626:C:A | NA | missense | c.2018G > T | p.Gly673Val |
| 2:25241626:C:T | rs902730598 | missense | c.2018G > A | p.Gly673Asp |
| 2:25241627:C:A | NA | missense | c.2017G > T | p.Gly673Cys |
| 2:25241629:AC:A | NA | frameshift | c.2014delG | p.Va1672fs |
| 2:25241630:C:T | NA | missense | c.2014G > A | p.Va1672Met |
| 2:25241630:CCGT | NA | frameshift | c.2000_2013delAG | p.Glu667fs |
| GATGGAGTCCT:C | | | GACTCCATCACG | |
| 2:25241631:CGTG | NA | frameshift | c.2005_2012delTC | p.Ser669fs |
| ATGGA:C | | | CATCAC | |
| 2:25241632:G:A | NA | missense | c.2012C > T | p.Thr671Met |
| 2:25241632:G:GT | NA | frameshift | c.2011dupA | p.Thr671fs |
| 2:25241632:GT:G | NA | frameshift | c.2011delA | p.Thr671fs |
| 2:25241633:TGAT | NA | frameshift | c.2007_2010delCA | p.Ile670fs |
| G:T | | | TC | |
| 2:25241634:GAT: | NA | frameshift | c.2008_2009delAT | p.Ile670fs |
| G | | | | |
| 2:25241634:GAT | NA | frameshift | c.1994_2009delTG | p.Va1665fs |
| GGAGTCCTCACAC | | | TGTGAGGACTCCAT | |
| A:G | | | | |
| 2:25241635:A:AG | NA | frameshift | c.2008_2009insCC | p.Ile670fs |
| GACTCCATCACGG | | | GTGATGGAGTCC | |
| 2:25241635:A:AT | NA | frameshift | c.1974_2008dupCC | p.Ile670fs |
| GGAGTCCTCACAC | | | GCTACATTGCCTCG | |
| ACCTCCGAGGCAA | | | GAGGTGTGTGAGG | |
| TGTAGCGG | | | ACTCCA | |
| 2:25241635:AT:A | NA | frameshift | c.2008delA | p.Ile670fs |
| 2:25241635:ATG | NA | frameshift | c.2004_2008delCT | p.Ser669fs |
| GAG: A | | | CCA | |
| 2:25241636:T:A | NA | missense | c.2008A > T | p.Ile670Phe |
| 2:25241636:T:G | NA | missense | c.2008A > C | p.Ile670Leu |
| 2:25241636:T:TG | rs753637583 | frameshift | c.2007dupC | p.Ile670fs |
| 2:25241636:TG:T | NA | frameshift | c.2007delC | p.Ile670fs |
| 2:25241637:GGA: | NA | frameshift | c.2005_2006delTC | p.Ser669fs |
| G | | | | |
| 2:25241637:GGA | NA | inframe_indel | c.1998_2006delTG | p.Glu667_Ser669 |
| GTCCTCA:G | | | AGGACTC | del |
| 2:25241638:G:A | NA | missense | c.2006C > T | p.Ser669Phe |
| 2:25241638:G:T | NA | missense | c.2006C > A | p.Ser669Tyr |
| 2:25241639:AG:A | NA | frameshift | c.2004delC | p.Ser669fs |
| 2:25241641:T:A | NA | missense | c.2003A > T | p.Asp668Val |
| 2:25241641:T:TC | NA | frameshift | c.2002dupG | p.Asp668fs |
| 2:25241641:TC:T | NA | frameshift | c.2002delG | p.Asp668fs |
| 2:25241642:C:T | NA | missense | c.2002G > A | p.Asp668Asn |
| 2:25241642:CCT: | NA | frameshift | c.2000_2001delAG | p.Glu667fs |
| C | | | | |
| 2:25241643:CT:C | NA | frameshift | c.2000delA | p.Glu667fs |
| 2:25241644:T:C | NA | missense | c.2000A > G | p.Glu667Gly |
| 2:25241644:TCA: | rs1467575781 | frameshift | c.1998_1999delTG | p.Cys666fs |
| T | | | | |
| 2:25241644:TCAC | NA | frameshift | c.1996_1999delTG | p.Cys666fs |
| A:T | | | TG | |
| 2:25241645:C:A | NA | stop_gained | c.1999G > T | p.Glu667* |
| 2:25241645:C:CA | NA | frameshift | c.1998dupT | p.Glu667fs |
| 2:25241646:A:C | NA | missense | c.1998T > G | p.Cys666Trp |
| 2:25241646:A:T | NA | stop_gained | c.1998T > A | p.Cys666* |
| 2:25241647:C:A | NA | missense | c.1997G > T | p.Cys666Phe |
| 2:25241647:C:T | NA | missense | c.1997G > A | p.Cys666Tyr |
| 2:25241648:A:C | NA | missense | c.1996T > G | p.Cys666Gly |
| 2:25241649:CA:C | rs1268925454 | frameshift | c.1994delT | p.Va1665fs |
| 2:25241650:A:C | rs762503226 | missense | c.1994T > G | p.Va1665Gly |
| 2:25241650:A:G | NA | missense | c.1994T > C | p.Va1665Ala |
| 2:25241650:A:T | rs762503226 | missense | c.1994T > A | p.Va1665Glu |
| 2:25241650:AC:A | NA | frameshift | c.1993delG | p.Va1665fs |
| 2:25241651:C:A | rs766020170 | missense | c.1993G > T | p.Va1665Leu |
| 2:25241651:C:T | NA | missense | c.1993G > A | p.Va1665Met |
| 2:25241652:CT:C | NA | frameshift | c.1991delA | p.Glu664fs |
| 2:25241652:CTCC | NA | inframe_indel | c.1974_1991delCC | p.Asp658_Ser663 |
| GAGGCAATGTAG | | | GCTACATTGCCTCG | del |
| CGG:C | | | GA | |
| 2:25241653:T:C | NA | missense | c.1991A > G | p.Glu664Gly |
| 2:25241653:TC:T | NA | frameshift | c.1990delG | p.Glu664fs |
| 2:25241653:TCCG | NA | frameshift | c.1977_1990delCT | p.Tyr660fs |
| AGGCAATGTAG:T | | | ACATTGCCTCGG | |
| 2:25241654:C:A | rs1476901854 | stop_gained | c.1990G > T | p.Glu664* |
| 2:25241654:C:G | NA | missense | c.1990G > C | p.Glu664Gln |
| 2:25241656:G:A | rs553080210 | missense | c.1988C > T | p.Ser663Leu |
| 2:25241656:G:C | NA | missense | c.1988_1998G | p.Ser663Trp |
| 2:25241656:G:T | NA | stop_gained | c.1988_1998A | p.Ser663* |
| 2:25241656:GAG | NA | inframe_indel | c.1979_1987delAC | p.Tyr660_Ala662 |
| GCAATGT:G | | | ATTGCCT | del |
| 2:25241657:A:G | NA | missense | c.1987T > C | p.Ser663Pro |
| 2:25241657:AG:A | NA | frameshift | c.1986delC | p.Ser663fs |
| 2:25241658:GGC | NA | frameshift | c.1978_1985delTA | p.Tyr660fs |
| AATGTA:G | | | CATTGC | |
| 2:25241659:G:A | NA | missense | c.1985C > T | p.Ala662Val |
| 2:25241659:G:T | NA | missense | c.1985C > A | p.Ala662Asp |
| 2:25241659:GCA | NA | frameshift | c.1981_1984delAT | p.Ile661fs |
| AT:G | | | TG | |
| 2:25241660:C:A | NA | missense | c.1984G > T | p.Ala662Ser |
| 2:25241660:C:CA | NA | frameshift | c.1983dupT | p.Ala662fs |
| 2:25241660:C:G | rs759408234 | missense | c.1984G > C | p.Ala662Pro |
| 2:25241660:C:T | rs759408234 | missense | c.1984G > A | p.Ala662Thr |
| 2:25241660:CAA: | NA | frameshift | c.1982_1983delTT | p.Ile661fs |
| C | | | | |
| 2:25241661:A:AA | NA | frameshift | c.1939_1982dupCT | p.Ala662fs |
| TGTAGCGGTCCAC | | | CCTGGTGCTGAAGG | |
| CTGAATGCCCAAG | | | ACTTGGGCATTCAG | |
| TCCTTCAGCACCA | | | GTGGACCGCTACAT | |
| GGAG | | | | |
| 2:25241661:AATG | NA | frameshift | c.1979_1982delAC | p.Tyr660fs |
| T:A | | | AT | |
| 2:25241662:A:C | NA | missense | c.1982T > G | p.Ile661Ser |
| 2:25241662:A:G | rs1471917721 | missense | c.1982T > C | p.Ile661Thr |
| 2:25241662:A:T | NA | missense | c.1982T > A | p.Ile661Asn |
| 2:25241662:AT:A | NA | frameshift | c.1981delA | p.Ile661fs |
| 2:25241662:ATGT | NA | inframe_indel | c.1976_1981delGC | p.Arg659_Ile661 |
| AGC:A | | | TACA | delinsLeu |
| 2:25241664:G:C | NA | stop_gained | c.1980C > G | p.Tyr660* |
| 2:25241664:G:GT | rs1158856353 | frameshift | c.1979dupA | p.Tyr660fs |
| 2:25241665:T:A | NA | missense | c.1979A > T | p.Tyr660Phe |
| 2:25241665:T:C | rs767552800 | missense | c.1979A > G | p.Tyr660Cys |
| 2:25241665:T:G | NA | missense | c.1979A > C | p.Tyr660Ser |
| 2:25241666:A:C | NA | missense | c.1978T > G | p.Tyr660Asp |
| 2:25241666:A:G | NA | missense | c.1978T > C | p.Tyr660His |
| 2:25241666:A:T | NA | missense | c.1978T > A | p.Tyr660Asn |
| 2:25241668:C:CG | NA | frameshift | c.1975dupC | p.Arg659fs |
| 2:25241668:C:T | rs752434188 | missense | c.1976G > A | p.Arg659His |
| 2:25241668:CG:C | NA | frameshift | c.1975delC | p.Arg659fs |
| 2:25241669:G:A | rs755982635 | missense | c.1975C > T | p.Arg659Cys |
| 2:25241669:G:C | rs755982635 | missense | c.1975C > G | p.Arg659Gly |
| 2:25241671:T:A | rs146164726 | missense | c.1973A > T | p.Asp658Val |
| 2:25241671:T:TC | NA | frameshift | c.1972dupG | p.Asp658fs |
| 2:25241671:T:TCC | NA | frameshift | c.1971_1972dupG | p.Asp658fs |
| | | | G | |
| 2:25241671:TC:T | NA | frameshift | c.1972delG | p.Asp658fs |
| 2:25241671:TCCA | NA | inframe_indel | c.1961_1972delGC | p.Gly654_Va1657 |
| CCTGAATGC:T | | | ATTCAGGTGG | del |
| 2:25241672:C:A | NA | missense | c.1972G > T | p.Asp658Tyr |
| 2:25241672:C:CC | NA | frameshift | c.1970_1971dupTG | p.Asp658fs |
| A | | | | |
| 2:25241672:C:T | NA | missense | c.1972G > A | p.Asp658Asn |
| 2:25241672:CCA: | NA | frameshift | c.1970_1971delTG | p.Va1657fs |
| C | | | | |
| 2:25241672:CCAC | NA | frameshift | c.1964_1971delTTC | p.Ile655fs |
| CTGAA:C | | | AGGTG | |
| 2:25241674:A:C | NA | missense | c.1970T > G | p.Va1657Gly |
| 2:25241674:A:G | NA | missense | c.1970T > C | p.Va1657Ala |
| 2:25241674:A:T | NA | missense | c.1970T > A | p.Va1657Glu |
| 2:25241674:AC:A | NA | frameshift | c.1969delG | p.Va1657fs |
| 2:25241674:ACCT | NA | frameshift | c.1962_1969delCA | p.Ile655fs |
| GAATG:A | | | TTCAGG | |
| 2:25241674:ACCT | NA | frameshift | c.1960_1969delGG | p.Gly654fs |
| GAATGCC:A | | | CATTCAGG | |
| 2:25241675:C:A | NA | missense | c.1969G > T | p.Va1657Leu |
| 2:25241675:C:G | NA | missense | c.1969G > C | p.Va1657Leu |
| 2:25241675:C:T | rs368961181 | missense | c.1969G > A | p.Va1657Met |
| 2:25241676:CT:C | NA | frameshift | c.1967delA | p.Gln656fs |
| 2:25241677:T:G | rs1323531460 | missense | c.1967A > C | p.Gln656Pro |
| 2:25241677:TG:T | NA | frameshift | c.1966delC | p.Gln656fs |
| 2:25241678:G:A | rs758402405 | stop_gained | c.1966C > T | p.Gln656* |
| 2:25241678:GAAT | NA | frameshift | c.1955_1965delAC | p.Asp652fs |
| GCCCAAGT:G | | | TTGGGCATT | |
| 2:25241679:A:C | NA | missense | c.1965T > G | p.Ile655Met |
| 2:25241679:AATG | NA | frameshift | c.1961_1964delGC | p.Gly654fs |
| C:A | | | AT | |
| 2:25241680:A:C | NA | missense | c.1964T > G | p.Ile655Ser |
| 2:25241680:A:G | NA | missense | c.1964T > C | p.Ile655Thr |
| 2:25241680:A:T | rs780120142 | missense | c.1964T > A | p.Ile655Asn |
| 2:25241680:AT:A | NA | frameshift | c.1963delA | p.Ile655fs |
| 2:25241681:T:C | NA | missense | c.1963A > G | p.Ile655Val |
| 2:25241681:T:TG | NA | frameshift | c.1961_1962dupGC | p.Ile655fs |
| C | | | | |
| 2:25241681:T:TTT | NA | frameshift | c.1962_1963insTG | p.Ile655fs |
| CA | | | AA | |
| 2:25241681:TG:T | NA | frameshift | c.1962delC | p.Ile655fs |
| 2:25241682:G:GC | NA | frameshift | c.1961dupG | p.Ile655fs |
| 2:25241682:GC:G | NA | frameshift | c.1961delG | p.Gly654fs |
| 2:25241682:GCCC | NA | frameshift | c.1946_1961delTG | p.Va1649fs |
| AAGTCCTTCAGCA: | | | CTGAAGGACTTGG | |
| G | | | G | |
| 2:25241683:C:A | NA | missense | c.1961G > T | p.Gly654Val |
| 2:25241683:C:G | NA | missense | c.1961G > C | p.Gly654Ala |
| 2:25241683:C:T | rs1297531346 | missense | c.1961G > A | p.Gly654Asp |
| 2:25241684:C:CC | NA | frameshift | c.1959_1960insAG | p.Gly654fs |
| T | | | | |
| 2:25241684:C:T | rs1371093470 | missense | c.1960G > A | p.Gly654Ser |
| 2:25241685:C:A | rs747168987 | missense | c.1959G > T | p.Leu653Phe |
| 2:25241685:C:G | NA | missense | c.1959G > C | p.Leu653Phe |
| 2:25241685:CA:C | NA | frameshift | c.1958delT | p.Leu653fs |
| 2:25241686:A:C | NA | missense | c.1958T > G | p.Leu653Trp |
| 2:25241686:A:G | NA | missense | c.1958T > C | p.Leu653Ser |
| 2:25241686:A:T | rs1202526721 | stop_gained | c.1958T > A | p.Leu653* |
| 2:25241686:AAGT | NA | frameshift | c.1948_1957delCT | p.Leu650fs |
| CCTTCAG:A | | | GAAGGACT | |
| 2:25241687:A:C | rs1461998130 | missense | c.1957T > G | p.Leu653Val |
| 2:25241687:A:T | NA | missense | c.1957T > A | p.Leu653Met |
| 2:25241687:AG:A | NA | frameshift | c.1956delC | p.Leu653fs |
| 2:25241688:G:GT | NA | frameshift | c.1952_1955dupA | p.Asp652fs |
| CCT | | | GGA | |
| 2:25241688:G:GT | NA | frameshift | c.1949_1955dupTG | p.Leu653fs |
| CCTTCA | | | AAGGA | |
| 2:25241688:GT:G | NA | frameshift | c.1955delA | p.Asp652fs |
| 2:25241689:TC:T | NA | frameshift | c.1954delG | p.Asp652fs |
| 2:25241689:TCCT | NA | inframe_indel | c.1946_1954delTG | p.Va1649_Lys651 |
| TCAGCA:T | | | CTGAAGG | del |
| 2:25241689:TCCT | NA | frameshift | c.1945_1954delGT | p.Va1649fs |
| TCAGCAC:T | | | GCTGAAGG | |
| 2:25241691:CT:C | NA | frameshift | c.1952delA | p.Lys651fs |
| 2:25241693:T:A | NA | stop_gained | c.1951A > T | p.Lys651* |
| 2:25241693:TCA: | NA | frameshift | c.1949_1950delTG | p.Leu650fs |
| T | | | | |
| 2:25241693:TCAG | NA | frameshift | c.1946_1950delTG | p.Va1649fs |
| CA:T | | | CTG | |
| 2:25241694:C:CA | NA | frameshift | c.1949dupT | p.Lys651fs |
| 2:25241694:CA:C | NA | frameshift | c.1949delT | p.Leu650fs |
| 2:25241695:A:C | NA | missense | c.1949T > G | p.Leu650Arg |
| 2:25241695:A:G | NA | missense | c.1949T > C | p.Leu650Pro |
| 2:25241695:A:T | rs1467909574 | missense | c.1949T > A | p.Leu650Gln |
| 2:25241695:AGC | NA | frameshift | c.1939_1948delCT | p.Leu647fs |
| ACCAGGAG:A | | | CCTGGTGC | |
| 2:25241696:G:C | rs1334392444 | missense | c.1948C > G | p.Leu650Val |
| 2:25241696:GC:G | NA | frameshift | c.1947delG | p.Leu650fs |
| 2:25241696:GCA: | NA | frameshift | c.1946_1947delTG | p.Va1649fs |
| G | | | | |
| 2:25241697:CA:C | NA | frameshift | c.1946delT | p.Va1649fs |
| 2:25241698:A:C | NA | missense | c.1946T > G | p.Va1649Gly |
| 2:25241698:A:T | NA | missense | c.1946T > A | p.Va1649Glu |
| 2:25241699:C:A | NA | missense | c.1945G > T | p.Va1649Leu |
| 2:25241699:C:CA | NA | frameshift | c.1944_1945insT | p.Va1649fs |
| 2:25241699:c.G | NA | missense | c.1945G > C | p.Va1649Leu |
| 2:25241699:C:T | NA | missense | c.1945G > A | p.Va1649Met |
| 2:25241700:C:CA | NA | inframe_indel | c.1941_1943dupCC | p.Leu648dup |
| GG | | | T | |
| 2:25241700:CA:C | NA | frameshift | c.1943delT | p.Leu648fs |
| 2:25241701:A:C | NA | missense | c.1943T > G | p.Leu648Arg |
| 2:25241701:A:G | rs587777507 | missense | c.1943T > C | p.Leu648Pro |
| 2:25241701:AG:A | rs1292349089 | frameshift | c.1942delC | p.Leu648fs |
| 2:25241701:AGG | NA | splice_acceptor | c.1937- | p.Gly646_Leu648 |
| AGCCCTGCACCAG | | | 10_1942delGCTGG | delinsVal |
| C:A | | | TGCAGGGCTCC | |
| 2:25241701:AGG | NA | splice_acceptor | c.1937- | p.Gly646_Leu648 |
| AGCCCTGCACCAG | | | 11_1942delGGCTG | delinsVal |
| CC:A | | | GTGCAGGGCTCC | |
| 2:25241704:A:AG | NA | frameshift | c.1938_1939dupGC | p.Leu647fs |
| C | | | | |
| 2:25241704:A:C | rs781742148 | missense | c.1940T > G | p.Leu647Arg |
| 2:25241704:A:G | NA | missense | c.1940T > C | p.Leu647Pro |
| 2:25241704:A:T | rs781742148 | missense | c.1940T > A | p.Leu647His |
| 2:25241705:G:C | NA | missense | c.1939C > G | p.Leu647Val |
| 2:25241705:G:GC | NA | frameshift | c.1938dupG | p.Leu647fs |
| 2:25241705:GC:G | NA | frameshift | c.1938delG | p.Leu647fs |
| 2:25241707:C:T | NA | missense | c.1937G > A | p.Gly646Glu |
| 2:25241708:C:A | NA | splice_acceptor | c.1937-1G > T | |
| 2:25241708:C:G | NA | splice_acceptor | c.1937-1G > C | |
| 2:25241708:C:T | rs748440577 | splice_acceptor | c.1937-1G > A | |
| 2:25241708:CT:C | NA | splice_acceptor | c.1937-2delA | |
| 2:25241709:T:A | NA | splice_acceptor | c.1937-2A > T | |
| 2:25241709:T:C | rs770305758 | splice_acceptor | c.1937-2A > G | |
| 2:25241709:T:G | NA | splice_acceptor | c.1937-2A > C | |
| 2:25243893:CTCA | NA | splice_donor | c.1928_1936+4delT | p.Ile643_Gly646 |
| CCTGTAGCGA:C | | | CGCTACAGGTGA | delinsArg |
| 2:25243895:C:CA | NA | splice_donor | c.1936+2dupT | |
| 2:25243896:A:G | rs1190050788 | splice_donor | c.1936+2T > C | |
| 2:25243896:A:T | NA | splice_donor | c.1936+2T > A | |
| 2:25243896:AC:A | NA | splice_donor | c.1936+1delG | |
| 2:25243897:C:A | rs1238786275 | splice_donor | c.1936+1G > T | |
| 2:25243897:C:G | NA | splice_donor | c.1936+1G > C | |
| 2:25243897:C:T | rs1238786275 | splice_donor | c.1936+1G > A | |
| 2:25243898:C:A | rs1472933404 | missense | c.1936G > T | p.Gly646Trp |
| 2:25243898:C:G | NA | missense | c.1936G > C | p.Gly646Arg |
| 2:25243898:C:T | NA | missense | c.1936G > A | p.Gly646Arg |
| 2:25243898:CT:C | NA | frameshift | c.1935delA | p.Leu647fs |
| 2:25243900:G:A | rs1387749234 | missense | c.1934C > T | p.Thr645Ile |
| 2:25243900:G:GT | NA | frameshift | c.1933dupA | p.Thr645fs |
| 2:25243901:T:C | | missense | c.1933A > G | p.Thr645Ala |
| 2:25243903:G:A | NA | missense | c.1931C > T | p.Ala644Val |
| 2:25243903:GC:G | NA | frameshift | c.1930delG | p.Ala644fs |
| 2:25243904:C:G | NA | missense | c.1930G > C | p.Ala644Pro |
| 2:25243904:C:T | rs1431156021 | missense | c.1930G > A | p.Ala644Thr |
| 2:25243904:CG:C | NA | frameshift | c.1929delC | p.Ile643fs |
| 2:25243905:G:GA | NA | frameshift | c.1928dupT | p.Ala644fs |
| 2:25243905:G:GA | NA | frameshift | c.1924_1928dupG | p.Ile643fs |
| TTCC | | | GAAT | |
| 2:25243905:GA:G | NA | frameshift | c.1928delT | p.Ile643fs |
| 2:25243905:GATT | NA | frameshift | c.1912_1928delTCT | p.Ser638fs |
| CCATCAAAGAGA | | | CTCTTTGATGGAAT | |
| GA:G | | | | |
| 2:25243906:A:G | NA | missense | c.1928T > C | p.Ile643Thr |
| 2:25243906:AT:A | NA | frameshift | c.1927delA | p.Ile643fs |
| 2:25243907:T:C | NA | missense | c.1927A > G | p.Ile643Val |
| 2:25243907:T:TTC | NA | frameshift | c.1923_1926dupTG | p.Ile643fs |
| CA | | | GA | |
| 2:25243908:T:TC | NA | frameshift | c.1925dupG | p.Ile643fs |
| 2:25243908:TCC:T | NA | frameshift | c.1924_1925delGG | p.Gly642fs |
| 2:25243909:C:A | NA | missense | c.1925G > T | p.Gly642Val |
| 2:25243909:C:CC | NA | frameshift | c.1923_1924dupTG | p.Gly642fs |
| A | | | | |
| 2:25243909:C:T | NA | missense | c.1925G > A | p.Gly642Glu |
| 2:25243910:C:A | rs551213321 | stop_gained | c.1924G > T | p.Gly642* |
| 2:25243910:C:T | rs551213321 | missense | c.1924G > A | p.Gly642Arg |
| 2:25243910:CA:C | NA | frameshift | c.1923delT | p.Asp641fs |
| 2:25243911:A:T | NA | missense | c.1923T > A | p.Asp641Glu |
| 2:25243912:T:A | NA | missense | c.1922A > T | p.Asp641Val |
| 2:25243912:TCAA | NA | inframe_indel | c.1916_1921delTCT | p.Leu639_Asp641 |
| AGA:T | | | TTG | delinsHis |
| 2:25243912:TCAA | NA | frameshift | c.1909_1921delCT | p.Leu637fs |
| AGAGAGACAG:T | | | GTCTCTCTTTG | |
| 2:25243913:C:A | NA | missense | c.1921G > T | p.Asp641Tyr |
| 2:25243913:C:CA | NA | frameshift | c.1920dupT | p.Asp641fs |
| 2:25243913:C:G | NA | missense | c.1921G > C | p.Asp641His |
| 2:25243913:C:T | rs1331365627 | missense | c.1921G > A | p.Asp641Asn |
| 2:25243913:CA:C | NA | frameshift | c.1920delT | p.Phe640fs |
| 2:25243913:CAA: | rs1412485785 | frameshift | c.1919_1920delTT | p.Phe640fs |
| C | | | | |
| 2:25243913:CAAA | NA | frameshift | c.1917_1920delCTT | p.Phe640fs |
| G:C | | | T | |
| 2:25243913:CAAA | NA | frameshift | c.1916_1920delTCT | p.Leu639fs |
| GA:C | | | TT | |
| 2:25243915:A:C | NA | missense | c.1919T > G | p.Phe640Cys |
| 2:25243915:A:G | NA | missense | c.1919T > C | p.Phe640Ser |
| 2:25243915:AAG: | NA | frameshift | c.1917_1918delCT | p.Phe640fs |
| A | | | | |
| 2:25243915:AAG | NA | frameshift | c.1915_1918delCT | p.Phe640fs |
| AG:A | | | CT | |
| 2:25243915:AAG | NA | frameshift | c.1911_1918delGT | p.Ser638fs |
| AGAGAC:A | | | CTCTCT | |
| 2:25243916:A:C | NA | missense | c.1918T > G | p.Phe640Val |
| 2:25243916:A:G | NA | missense | c.1918T > C | p.Phe640Leu |
| 2:25243916:A:T | NA | missense | c.1918T > A | p.Phe640Ile |
| 2:25243917:GA:G | NA | frameshift | c.1916delT | p.Leu639fs |
| 2:25243918:A:C | NA | missense | c.1916T > G | p.Leu639Arg |
| 2:25243918:A:G | NA | missense | c.1916T > C | p.Leu639Pro |
| 2:25243918:A:T | NA | missense | c.1916T > A | p.Leu639His |
| 2:25243918:AG:A | NA | frameshift | c.1915delC | p.Leu639fs |
| 2:25243919:G:A | NA | missense | c.1915C > T | p.Leu639Phe |
| 2:25243919:G:C | NA | missense | c.1915C > G | p.Leu639Val |
| 2:25243919:G:GA | NA | frameshift | c.1911_1914dupGT | p.Leu639fs |
| GAC | | | CT | |
| 2:25243919:GA:G | NA | frameshift | c.1914delT | p.Leu639fs |
| 2:25243919:GAG | NA | frameshift | c.1911_1914delGT | p.Phe640fs |
| AC:G | | | CT | |
| 2:25243920:A:AG | NA | frameshift | c.1913dupC | p.Leu639fs |
| 2:25243921:G:A | rs1253868717 | missense | c.1913C > T | p.Ser638Phe |
| 2:25243921:G:C | rs1253868717 | missense | c.1913C > G | p.Ser638Cys |
| 2:25243921:G:T | NA | missense | c.1913C > A | p.Ser638Tyr |
| 2:25243921:GAC: | NA | frameshift | c.1911_1912delGT | p.Phe640fs |
| G | | | | |
| 2:25243922:A:C | NA | missense | c.1912T > G | p.Ser638Ala |
| 2:25243922:A:G | NA | missense | c.1912T > C | p.Ser638Pro |
| 2:25243922:AC:A | NA | frameshift | c.1911delG | p.Ser638fs |
| 2:25243923:CA:C | NA | frameshift | c.1910delT | p.Leu637fs |
| 2:25243924:A:C | rs371523368 | missense | c.1910T > G | p.Leu637Arg |
| 2:25243924:A:G | rs371523368 | missense | c.1910T > C | p.Leu637Pro |
| 2:25243924:A:T | NA | missense | c.1910T > A | p.Leu637Gln |
| 2:25243925:G:C | NA | missense | c.1909C > G | p.Leu637Val |
| 2:25243925:G:GC | NA | frameshift | c.1907_1908dupTG | p.Leu637fs |
| A | | | | |
| 2:25243925:G:GT | NA | frameshift | c.1908_1909insA | p.Leu637fs |
| 2:25243926:CA:C | NA | frameshift | c.1907delT | p.Va1636fs |
| 2:25243927:A:AC | NA | frameshift | c.1900_1906dupAT | p.Va1636fs |
| CCGGAT | | | CCGGG | |
| 2:25243927:A:C | rs929806900 | missense | c.1907T > G | p.Va1636Gly |
| 2:25243927:A:G | NA | missense | c.1907T > C | p.Va1636Ala |
| 2:25243927:A:T | NA | missense | c.1907T > A | p.Va1636Glu |
| 2:25243927:AC:A | rs778979256 | frameshift | c.1906delG | p.Va1636fs |
| 2:25243927:ACCC | NA | frameshift | c.1902_1906delCC | p.Arg635fs |
| GG:A | | | GGG | |
| 2:25243928:C:A | rs376550450 | missense | c.1906G > T | p.Va1636Leu |
| 2:25243928:C:CA | NA | frameshift | c.1905_1906insT | p.Va1636fs |
| 2:25243928:C:G | NA | missense | c.1906G > C | p.Va1636Leu |
| 2:25243928:C:T | rs376550450 | missense | c.1906G > A | p.Va1636Met |
| 2:25243930:C:A | NA | missense | c.1904G > T | p.Arg635Leu |
| 2:25243930:C:G | rs751562376 | missense | c.1904G > C | p.Arg635Pro |
| 2:25243930:C:T | rs751562376 | missense | c.1904G > A | p.Arg635Gln |
| 2:25243930:CG:C | rs1326186258 | frameshift | c.1903delC | p.Arg635fs |
| 2:25243930:CGG | NA | inframe_indel | c.1874_1903delCT | p.Pro625_Ile634 |
| ATGGGCTTCCTCT | | | GTCCCAGCTGAGAA | del |
| TCTCAGCTGGGAC | | | GAGGAAGCCCATCC | |
| AG:C | | | | |
| 2:25243931:G:A | rs144689354 | missense | c.1903C > T | p.Arg635Trp |
| 2:25243931:G:C | NA | missense | c.1903C > G | p.Arg635Gly |
| 2:25243932:G:C | NA | missense | c.1902C > G | p.Ile634Met |
| 2:25243932:G:GA | NA | frameshift | c.1894_1901dupAA | p.Arg635fs |
| TGGGCTT | | | GCCCAT | |
| 2:25243932:GA:G | NA | frameshift | c.1901delT | p.Ile634fs |
| 2:25243933:A:AT | NA | frameshift | c.1899_1900dupCA | p.Ile634fs |
| G | | | | |
| 2:25243933:A:C | NA | missense | c.1901T > G | p.Ile634Ser |
| 2:25243933:A:G | rs1390273539 | missense | c.1901T > C | p.Ile634Thr |
| 2:25243933:A:T | NA | missense | c.1901T > A | p.Ile634Asn |
| 2:25243933:AT:A | NA | frameshift | c.1900delA | p.Ile634fs |
| 2:25243934:T:A | NA | missense | c.1900A > T | p.Ile634Phe |
| 2:25243934:TG:T | NA | frameshift | c.1899delC | p.Ile634fs |
| 2:25243936:G:A | rs1446825883 | missense | c.1898C > T | p.Pro633Leu |
| 2:25243936:G:C | rs1446825883 | missense | c.1898C > G | p.Pro633Arg |
| 2:25243936:G:GG | NA | frameshift | c.1894_1897dupAA | p.Pro633fs |
| CTT | | | GC | |
| 2:25243936:G:T | NA | missense | c.1898C > A | p.Pro633His |
| 2:25243937:G:A | rs1191994998 | missense | c.1897C > T | p.Pro633Ser |
| 2:25243937:G:GC | NA | frameshift | c.1896dupG | p.Pro633fs |
| 2:25243937:G:T | NA | missense | c.1897C > A | p.Pro633Thr |
| 2:25243937:GC:G | NA | frameshift | c.1896delG | p.Lys632fs |
| 2:25243938:CT:C | rs1195836932 | frameshift | c.1895delA | p.Lys632fs |
| 2:25243939:T:TTC | NA | frameshift | c.1875_1894dupTG | p.Lys632fs |
| CTCTTCTCAGCTG | | | TCCCAGCTGAGAAG | |
| GGACA | | | AGGA | |
| 2:25243940:T:A | rs1245875087 | stop_gained | c.1894A > T | p.Lys632* |
| 2:25243940:T:G | NA | missense | c.1894A > C | p.Lys632Gln |
| 2:25243940:TC:T | NA | frameshift | c.1893delG | p.Lys632fs |
| 2:25243941:C:A | NA | missense | c.1893G > T | p.Arg631Ser |
| 2:25243941:c.G | NA | missense | c.1893G > C | p.Arg631Ser |
| 2:25243941:CCTC | NA | frameshift | c.1880_1892delCA | p.Pro627fs |
| TTCTCAGCTG:C | | | GCTGAGAAGAG | |
| 2:25243942:C:A | NA | missense | c.1892G > T | p.Arg631Met |
| 2:25243942:C:G | rs1159270298 | missense | c.1892G > C | p.Arg631Thr |
| 2:25243942:C:T | NA | missense | c.1892G > A | p.Arg631Lys |
| 2:25243943:T:A | rs1450721986 | missense | c.1891A > T | p.Arg631Trp |
| 2:25243943:T:C | NA | missense | c.1891A > G | p.Arg631Gly |
| 2:25243944:CT:C | NA | frameshift | c.1889delA | p.Lys630fs |
| 2:25243944:CTT:C | NA | frameshift | c.1888_1889delAA | p.Lys630fs |
| 2:25243945:T:TTC | NA | frameshift | c.1887_1888dupG | p.Lys630fs |
| | | | A | |
| 2:25243946:T:A | NA | stop_gained | c.1888A > T | p.Lys630* |
| 2:25243947:CT:C | NA | frameshift | c.1886delA | p.Glu629fs |
| 2:25243947:CTCA | NA | frameshift | c.1865_1886delTTT | p.Va1622fs |
| GCTGGGACAGGT | | | ACCCACCTGTCCCA | |
| GGGTAAA:C | | | GCTGA | |
| 2:25243949:C:A | NA | stop_gained | c.1885G > T | p.Glu629* |
| 2:25243949:C:CA | NA | frameshift | c.1884dupT | p.Glu629fs |
| 2:25243949:CAG: | NA | frameshift | c.1883_1884delCT | p.Ala628fs |
| C | | | | |
| 2:25243951:G:T | rs149876809 | missense | c.1883C > A | p.Ala628Asp |
| 2:25243951:GC:G | NA | frameshift | c.1882delG | p.Ala628fs |
| 2:25243953:T:TG | NA | frameshift | c.1880dupC | p.Ala628fs |
| 2:25243953:TG:T | NA | frameshift | c.1880delC | p.Pro627fs |
| 2:25243954:GGG | NA | frameshift | c.1860_1879delAA | p.Lys621fs |
| ACAGGTGGGTAA | | | AGGTTTACCCACCT | |
| ACCTTT:G | | | GTCC | |
| 2:25243956:GA:G | NA | frameshift | c.1877delT | p.Va1626fs |
| 2:25243956:GAC | NA | inframe_indel | c.1866_1877delTT | p.Tyr623_Va1626 |
| AGGTGGGTAA:G | | | ACCCACCTGT | del |
| 2:25243957:A:C | NA | missense | c.1877T > G | p.Va1626Gly |
| 2:25243957:A:T | NA | missense | c.1877T > A | p.Va1626Asp |
| 2:25243957:AC:A | NA | frameshift | c.1876delG | p.Va1626fs |
| 2:25243958:CA:C | NA | frameshift | c.1875delT | p.Va1626fs |
| 2:25243958:CAG | NA | frameshift | c.1866_1875delTT | p.Tyr623fs |
| GTGGGTAA:C | | | ACCCACCT | |
| 2:25243959:A:AG | NA | frameshift | c.1870_1874dupCC | p.Va1626fs |
| GTGG | | | ACC | |
| 2:25243959:AG:A | NA | frameshift | c.1874delC | p.Pro625fs |
| 2:25243960:G:C | NA | missense | c.1874C > G | p.Pro625Arg |
| 2:25243960:G:GG | NA | frameshift | c.1872_1873dupAC | p.Pro625fs |
| T | | | | |
| 2:25243961:G:GT | NA | frameshift | c.1872dupA | p.Pro625fs |
| 2:25243961:GT:G | rs745381125 | frameshift | c.1872delA | p.Pro625fs |
| 2:25243962:TG:T | NA | frameshift | c.1871delC | p.Pro624fs |
| 2:25243963:GGG | NA | frameshift | c.1866_1870delTT | p.Tyr623fs |
| TAA:G | | | ACC | |
| 2:25243963:GGG | rs1394353623 | inframe_indel | c.1865_1870delTTT | p.Va1622_Pro624 |
| TAAA:G | | | ACC | delinsAla |
| 2:25243964:G:GG | NA | frameshift | c.1869_1870insAT | p.Pro624fs |
| TAAACCTTTGGAG | | | GCTTAGGACCCTCC | |
| GGTCCTAAGCAT | | | AAAGGTTTAC | |
| 2:25243964:G:GG | NA | frameshift | c.1869_1870insTA | p.Pro624fs |
| TTTA | | | AAC | |
| 2:25243965:G:C | NA | stop_gained | c.1869C > G | p.Tyr623* |
| 2:25243965:G:GT | NA | frameshift | c.1868_1869insAA | p.Tyr623fs |
| T | | | | |
| 2:25243965:G:T | NA | stop_gained | c.1869C > A | p.Tyr623* |
| 2:25243965:GT:G | NA | frameshift | c.1868delA | p.Tyr623fs |
| 2:25243966:T:TA | NA | frameshift | c.1867dupT | p.Tyr623fs |
| 2:25243966:T:TA | NA | frameshift | c.1867_1868insGG | p.Tyr623fs |
| ACCC | | | GTT | |
| 2:25243966:TA:T | NA | frameshift | c.1867delT | p.Tyr623fs |
| 2:25243966:TAAA | NA | frameshift | c.1863_1867delGG | p.Va1622fs |
| CC:T | | | TTT | |
| 2:25243968:A:AA | rs1477019156 | frameshift | c.1864_1865dupGT | p.Tyr623fs |
| C | | | | |
| 2:25243968:A:AT | NA | frameshift | c.1865_1866insGT | p.Tyr623fs |
| TAC | | | AA | |
| 2:25243969:AC:A | NA | frameshift | c.1864delG | p.Va1622fs |
| 2:25243969:ACCT | NA | frameshift | c.1861_1864delAA | p.Lys621fs |
| T:A | | | GG | |
| 2:25243971:CT:C | NA | frameshift | c.1862delA | p.Lys621fs |
| 2:25243973:T:A | NA | stop_gained | c.1861A > T | p.Lys621* |
| 2:25243974:TG:T | NA | frameshift | c.1859delC | p.Pro620fs |
| 2:25243976:GA:G | NA | frameshift | c.1857delT | p.Pro620fs |
| 2:25243977:AG:A | NA | frameshift | c.1856delC | p.Pro619fs |
| 2:25243980:GT:G | NA | frameshift | c.1853delA | p.Asp618fs |
| 2:25243981:TC:T | NA | frameshift | c.1852delG | p.Asp618fs |
| 2:25243983:C:T | rs866791048 | splice_acceptor | c.1852-1G > A | |
| 2:25244151:TCA: | rs1228601968 | splice_donor | c.1851+2_1851+3del | |
| T | | | TG | |
| 2:25244152:CA:C | NA | splice_donor | c.1851+2delT | |
| 2:25244152:CACA | NA | frameshift | c.1847_1851+2del | p.Glu616fs |
| AATT:C | | | AATTTGT | |
| 2:25244153:A:C | NA | splice_donor | c.1851+2T > G | |
| 2:25244153:A:G | rs757785566 | splice_donor | c.1851+2T > C | |
| 2:25244153:A:T | rs757785566 | splice_donor | c.1851+2T > A | |
| 2:25244153:AC:A | NA | splice_donor | c.1851+1delG | |
| 2:25244153:ACAA | NA | frameshift | c.1848_1851+ldel | p.Phe617fs |
| AT:A | | | ATTTG | |
| 2:25244154:C:A | NA | splice_donor | c.1851+1G > T | |
| 2:25244154:C:G | NA | splice_donor | c.1851+1G > C | |
| 2:25244154:C:T | rs928051436 | splice_donor | c.1851+1G > A | |
| 2:25244154:CA:C | NA | frameshift | c.1851delT | p.Phe617fs |
| 2:25244157:AT:A | NA | frameshift | c.1848delA | p.Glu616fs |
| 2:25244158:T:TG | NA | frameshift | c.1847_1848insC | p.Glu616fs |
| 2:25244159:T:A | NA | missense | c.1847A > T | p.Glu616Val |
| 2:25244159:TC:T | rs1409292254 | frameshift | c.1846delG | p.Glu616fs |
| 2:25244160:C:A | rs779600073 | stop_gained | c.1846G > T | p.Glu616* |
| 2:25244161:CT:C | NA | frameshift | c.1844delA | p.Gln615fs |
| 2:25244162:TG:T | NA | frameshift | c.1843delC | p.Gln615fs |
| 2:25244162:TGGT | NA | frameshift | c.1840_1843delGA | p.Asp614fs |
| C:T | | | CC | |
| 2:25244163:G:A | rs768548187 | stop_gained | c.1843C > T | p.Gln615* |
| 2:25244163:G:GG | NA | frameshift | c.1838_1842dupAC | p.Gln615fs |
| TCGT | | | GAC | |
| 2:25244164:GT:G | NA | frameshift | c.1841delA | p.Asp614fs |
| 2:25244165:TC:T | rs757911864 | frameshift | c.1840delG | p.Asp614fs |
| 2:25244166:CG:C | NA | frameshift | c.1839delC | p.His613fs |
| 2:25244167:GT:G | rs1431450984 | frameshift | c.1838delA | p.His613fs |
| 2:25244167:GTG | NA | frameshift | c.1835_1838delAC | p.Asn612fs |
| GT:G | | | CA | |
| 2:25244167:GTG | NA | inframe_indel | c.1818_1838delGA | p.Gln606_Asn612 |
| GTTATTAGCGAAG | | | TGTTCTTCGCTAAT | del |
| AACATC:G | | | AACCA | |
| 2:25244168:T:TG | NA | frameshift | c.1837dupC | p.His613fs |
| 2:25244168:TG:T | NA | frameshift | c.1837delC | p.His613fs |
| 2:25244168:TGGT | NA | frameshift | c.1828_1837delGC | p.Ala610fs |
| TATTAGC:T | | | TAATAACC | |
| 2:25244170:G:GT | NA | frameshift | c.1834_1835dupAA | p.Asn612fs |
| T | | | | |
| 2:25244170:GT:G | NA | frameshift | c.1835delA | p.Asn612fs |
| 2:25244170:GTT: | NA | frameshift | c.1834_1835delAA | p.Asn612fs |
| G | | | | |
| 2:25244170:GTTA | NA | frameshift | c.1832_1835delAT | p.Asn611fs |
| T:G | | | AA | |
| 2:25244172:TA:T | NA | frameshift | c.1833delT | p.Asn611fs |
| 2:25244172:TATT | NA | frameshift | c.1827_1833delCG | p.Phe609fs |
| AGCG:T | | | CTAAT | |
| 2:25244172:TATT | NA | frameshift | c.1826_1833delTC | p.Phe609fs |
| AGCGA:T | | | GCTAAT | |
| 2:25244173:AT:A | NA | frameshift | c.1832delA | p.Asn611fs |
| 2:25244174:TTAG | NA | frameshift | c.1827_1831delCG | p.Phe609fs |
| CG:T | | | CTA | |
| 2:25244176:AG:A | NA | frameshift | c.1829delC | p.Ala610fs |
| 2:25244177:G:C | rs930025818 | missense | c.1829C > G | p.Ala610Gly |
| 2:25244178:C:CG | NA | frameshift | c.1827dupC | p.Ala610fs |
| 2:25244178:C:T | NA | missense | c.1828G > A | p.Ala610Thr |
| 2:25244178:CG:C | | frameshift | c.1827delC | p.Phe609fs |
| 2:25244179:GA:G | NA | frameshift | c.1826delT | p.Phe609fs |
| 2:25244181:AG:A | NA | frameshift | c.1824delC | p.Phe609fs |
| 2:25244182:G:GC | NA | frameshift | c.1823_1824insG | p.Phe608fs |
| 2:25244182:G:GT | NA | frameshift | c.1823_1824insA | p.Phe608fs |
| 2:25244182:GA:G | NA | frameshift | c.1823delT | p.Phe608fs |
| 2:25244183:AAC: | NA | frameshift | c.1821_1822delGT | p.Met607fs |
| A | | | | |
| 2:25244184:A:AC | NA | frameshift | c.1817_1821dupA | p.Phe608fs |
| ATCT | | | GATG | |
| 2:25244184:A:AC | NA | frameshift | c.1812_1821dupGC | p.Phe608fs |
| ATCTGGAGC | | | TCCAGATG | |
| 2:25244185:CATC | NA | frameshift | c.1816_1820delCA | p.Gln606fs |
| TG:C | | | GAT | |
| 2:25244188:CT:C | NA | frameshift | c.1817delA | p.Gln606fs |
| 2:25244188:CTG: | NA | frameshift | c.1816_1817delCA | p.Gln606fs |
| C | | | | |
| 2:25244189:T:TG | NA | frameshift | c.1810_1816dupCG | p.Gln606fs |
| GAGCCG | | | GCTCC | |
| 2:25244189:TG:T | NA | frameshift | c.1816delC | p.Gln606fs |
| 2:25244190:G:A | rs1396358001 | stop_gained | c.1816C > T | p.Gln606* |
| 2:25244193:GC:G | NA | frameshift | c.1812delG | p.Leu605fs |
| 2:25244195:C:G | NA | missense | c.1811G > C | p.Arg604Pro |
| 2:25244195:C:T | rs759818409 | missense | c.1811G > A | p.Arg604Gln |
| 2:25244195:CG:C | rs779782698 | frameshift | c.1810delC | p.Arg604fs |
| 2:25244196:G:A | rs1368287759 | missense | c.1810C > T | p.Arg604Trp |
| 2:25244196:G:C | NA | missense | c.1810C > G | p.Arg604Gly |
| 2:25244198:GA:G | NA | frameshift | c.1807delT | p.Ser603fs |
| 2:25244199:AG:A | NA | frameshift | c.1806delC | p.Ser603fs |
| 2:25244199:AGG: | NA | frameshift | c.1805_1806delCC | p.Pro602fs |
| A | | | | |
| 2:25244199:AGG | NA | frameshift | c.1803_1806delGC | p.Trp601fs |
| GC:A | | | CC | |
| 2:25244202:G:T | NA | missense | c.1804C > A | p.Pro602Thr |
| 2:25244202:GC:G | NA | frameshift | c.1803delG | p.Trp601fs |
| 2:25244202:GCCA | NA | frameshift | c.1799_1803delAC | p.Asp600fs |
| GT:G | | | TGG | |
| 2:25244203:C:T | rs767692203 | stop_gained | c.1803G > A | p.Trp601* |
| 2:25244203:CCA: | NA | frameshift | c.1801_1802delTG | p.Trp601fs |
| C | | | | |
| 2:25244204:C:T | rs941325374 | stop_gained | c.1802G > A | p.Trp601* |
| 2:25244204:CA:C | NA | frameshift | c.1801delT | p.Trp601fs |
| 2:25244205:A:AG | NA | frameshift | c.1800dupC | p.Trp601fs |
| 2:25244205:A:G | NA | missense | c.1801T > C | p.Trp601Arg |
| 2:25244205:AG:A | NA | frameshift | c.1800delC | p.Trp601fs |
| 2:25244206:G:GT | NA | frameshift | c.1795_1799dupG | p.Asp600fs |
| CCTC | | | AGGA | |
| 2:25244208:C:CC | NA | frameshift | c.1796_1797dupA | p.Asp600fs |
| T | | | G | |
| 2:25244209:CT:C | NA | frameshift | c.1796delA | p.Glu599fs |
| 2:25244211:C:A | NA | stop_gained | c.1795G > T | p.Glu599* |
| 2:25244211:C:CT | NA | frameshift | c.1794dupA | p.Glu599fs |
| 2:25244212:T:TC | NA | frameshift | c.1793dupG | p.Glu599fs |
| 2:25244212:TCGC | NA | inframe_indel | c.1791_1793delGC | p.Arg598del |
| T | | | G | |
| 2:25244213:C:T | rs764679587 | missense | c.1793G > A | p.Arg598Gln |
| 2:25244214:G:A | rs568207978 | stop_gained | c.1792C > T | p.Arg598* |
| 2:25244214:G:C | NA | missense | c.1792C > G | p.Arg598Gly |
| 2:25244216:CG:C | NA | frameshift | c.1789delC | p.Arg597fs |
| 2:25244216:CGCC | NA | inframe_indel | c.1781_1789delTG | p.Leu594_Arg596 |
| GCAGCA:C | | | CTGCGGC | del |
| 2:25244217:G:A | rs757492795 | missense | c.1789C > T | p.Arg597Trp |
| 2:25244217:G:GC | NA | frameshift | c.1788dupG | p.Arg597fs |
| 2:25244217:GC:G | NA | frameshift | c.1788delG | p.Arg597fs |
| 2:25244218:C:CC | NA | frameshift | c.1783_1787dupCT | p.Arg597fs |
| GCAG | | | GCG | |
| 2:25244218:C:CC | NA | frameshift | c.1787_1788insACT | p.Arg597fs |
| GCAGCAGCCCGTA | | | ACGGGCTGCTGCG | |
| GT | | | | |
| 2:25244219:C:T | rs899717364 | missense | c.1787G > A | p.Arg596Gln |
| 2:25244219:CGCA | NA | frameshift | c.1773_1786delCT | p.Tyr592fs |
| GCAGCCCGTAG:C | | | ACGGGCTGCTGC | |
| 2:25244220:G:GC | NA | frameshift | c.1785dupG | p.Arg596fs |
| 2:25244220:GC:G | NA | frameshift | c.1785delG | p.Arg596fs |
| 2:25244221:CA:C | NA | frameshift | c.1784delT | p.Leu595fs |
| 2:25244222:A:C | NA | missense | c.1784T > G | p.Leu595Arg |
| 2:25244222:A:G | rs1483256801 | missense | c.1784T > C | p.Leu595Pro |
| 2:25244223:G:GC | NA | frameshift | c.1779_1782dupGC | p.Leu595fs |
| AGC | | | TG | |
| 2:25244223:GC:G | NA | frameshift | c.1782delG | p.Leu595fs |
| 2:25244224:CA:C | NA | frameshift | c.1781delT | p.Leu594fs |
| 2:25244225:AGCC | NA | frameshift | c.1759_1780delGG | p.Gly587fs |
| CGTAGGTACCCTT | | | GCACAAGGGTACCT | |
| GTGCCC:A | | | ACGGGC | |
| 2:25244226:GCG | NA | frameshift | c.1779delG | p.Leu594fs |
| 2:25244229:C:CG | NA | frameshift | c.1773_1776dupCT | p.Gly593fs |
| TAG | | | AC | |
| 2:25244229:C:T | rs755573228 | missense | c.1777G > A | p.Gly593Arg |
| 2:25244229:CG:C | NA | frameshift | c.1776delC | p.Tyr592fs |
| 2:25244230:G:C | rs758063797 | stop_gained | c.1776C > G | p.Tyr592* |
| 2:25244230:G:GT | NA | frameshift | c.1775_1776insGA | p.Tyr592fs |
| C | | | | |
| 2:25244230:G:T | rs758063797 | stop_gained | c.1776C > A | p.Tyr592* |
| 2:25244231:TA:T | NA | frameshift | c.1774delT | p.Tyr592fs |
| 2:25244231:TAG | NA | frameshift | c.1755_1774delGT | p.Met585fs |
| GTACCCTTGTGCC | | | GCGGGCACAAGGG | |
| CGCAC:T | | | TACCT | |
| 2:25244232:A:AG | NA | frameshift | c.1773dupC | p.Tyr592fs |
| 2:25244234:G:A | NA | missense | c.1772C > T | p.Thr591Ile |
| 2:25244235:TACC | NA | frameshift | c.1764_1770delCA | p.His588fs |
| CTTG:T | | | AGGGT | |
| 2:25244235:TACC | NA | frameshift | c.1748_1770delGC | p.Cys583fs |
| CTTGTGCCCGCAC | | | TACATGTGCGGGCA | |
| ATGTAGC:T | | | CAAGGGT | |
| 2:25244236:AC:A | NA | frameshift | c.1769delG | p.Gly590fs |
| 2:25244236:ACCC | NA | frameshift | c.1763_1769delAC | p.His588fs |
| TTGT:A | | | AAGGG | |
| 2:25244239:CT:C | NA | frameshift | c.1766delA | p.Lys589fs |
| 2:25244240:T:C | rs1324043719 | missense | c.1766A > G | p.Lys589Arg |
| 2:25244240:TTG: | NA | frameshift | c.1764_1765delCA | p.His588fs |
| T | | | | |
| 2:25244240:TTGT | NA | frameshift | c.1761_1765delGC | p.His588fs |
| GC:T | | | ACA | |
| 2:25244242:GT:G | NA | frameshift | c.1763delA | p.His588fs |
| 2:25244242:GTGC | NA | frameshift | c.1753_1763delAT | p.Met585fs |
| CCGCACAT:G | | | GTGCGGGCA | |
| 2:25244243:T:TG | NA | frameshift | c.1759_1762dupG | p.His588fs |
| CCC | | | GGC | |
| 2:25244243:TG:T | NA | frameshift | c.1762delC | p.His588fs |
| 2:25244244:GC:G | rs1313980878 | frameshift | c.1761delG | p.His588fs |
| 2:25244246:C:A | NA | missense | c.1760G > T | p.Gly587Val |
| 2:25244246:C:G | NA | missense | c.1760G > C | p.Gly587Ala |
| 2:25244247:CGCA | NA | frameshift | c.1752_1758delCA | p.Tyr584fs |
| CATG:C | | | TGTGC | |
| 2:25244248:G:C | NA | missense | c.1758C > G | p.Cys586Trp |
| 2:25244248:G:GC | NA | frameshift | c.1756_1757dupTG | p.Gly587fs |
| A | | | | |
| 2:25244248:G:T | rs746498722 | stop_gained | c.1758C > A | p.Cys586* |
| 2:25244248:GCA: | NA | frameshift | c.1756_1757delTG | p.Cys586fs |
| G | | | | |
| 2:25244249:C:CA | NA | frameshift | c.1756dupT | p.Cys586fs |
| 2:25244249:C:G | NA | missense | c.1757G > C | p.Cys586Ser |
| 2:25244249:C:T | rs754506713 | missense | c.1757G > A | p.Cys586Tyr |
| 2:25244250:A:AC | rs1371954044 | frameshift | c.1755dupG | p.Cys586fs |
| 2:25244250:A:C | NA | missense | c.1756T > G | p.Cys586Gly |
| 2:25244250:A:G | NA | missense | c.1756T > C | p.Cys586Arg |
| 2:25244250:AC:A | rs1376463207 | frameshift | c.1755delG | p.Met585fs |
| 2:25244250:ACAT | NA | frameshift | c.1743_1755delGA | p.Trp581fs |
| GTAGCAGTTC:A | | | ACTGCTACATG | |
| 2:25244251:CA:C | NA | frameshift | c.1754delT | p.Met585fs |
| 2:25244251:CATG | NA | frameshift | c.1747_1754delTG | p.Cys583fs |
| TAGCA:C | | | CTACAT | |
| 2:25244251:CATG | NA | frameshift | c.1745_1754delAC | p.Asn582fs |
| TAGCAGT:C | | | TGCTACAT | |
| 2:25244252:A:AT | NA | frameshift | c.1752_1753dupCA | p.Met585fs |
| G | | | | |
| 2:25244252:AT:A | NA | frameshift | c.1753delA | p.Met585fs |
| 2:25244252:ATGT | NA | frameshift | c.1746_1753delCT | p.Cys583fs |
| AGCAG:A | | | GCTACA | |
| 2:25244253:T:C | NA | missense | c.1753A > G | p.Met585Val |
| 2:25244253:TG:T | NA | frameshift | c.1752delC | p.Tyr584fs |
| 2:25244253:TGTA | NA | frameshift | c.1740_1752delCT | p.Trp581fs |
| GCAGTTCCAG:T | | | GGAACTGCTAC | |
| 2:25244253:TGTA | NA | frameshift | c.1739_1752delCC | p.Pro580fs |
| GCAGTTCCAGG:T | | | TGGAACTGCTAC | |
| 2:25244254:G:C | NA | stop_gained | c.1752C > G | p.Tyr584* |
| 2:25244254:G:GT | NA | frameshift | c.1751dupA | p.Tyr584fs |
| 2:25244254:G:T | NA | stop_gained | c.1752C > A | p.Tyr584* |
| 2:25244254:GT:G | NA | frameshift | c.1751delA | p.Tyr584fs |
| 2:25244255:T:C | NA | missense | c.1751A > G | p.Tyr584Cys |
| 2:25244256:A:G | NA | missense | c.1750T > C | p.Tyr584His |
| 2:25244257:G:C | NA | missense | c.1749C > G | p.Cys583Trp |
| 2:25244257:G:T | NA | stop_gained | c.1749C > A | p.Cys583* |
| 2:25244257:GC:G | NA | frameshift | c.1748delG | p.Cys583fs |
| 2:25244258:C:G | NA | missense | c.1748G > C | p.Cys583Ser |
| 2:25244258:C:T | rs748082838 | missense | c.1748G > A | p.Cys583Tyr |
| 2:25244259:A:G | NA | missense | c.1747T > C | p.Cys583Arg |
| 2:25244259:A:T | NA | missense | c.1747T > A | p.Cys583Ser |
| 2:25244259:AG:A | NA | frameshift | c.1746delC | p.Cys583fs |
| 2:25244260:G:GT | NA | frameshift | c.1745dupA | p.Asn582fs |
| 2:25244260:GT:G | NA | frameshift | c.1745delA | p.Asn582fs |
| 2:25244260:GTTC | NA | frameshift | c.1735_1745delGA | p.Asp579fs |
| CAGGGGTC:G | | | CCCCTGGAA | |
| 2:25244262:TC:T | NA | frameshift | c.1743delG | p.Trp581fs |
| 2:25244263:C:A | rs769419803 | missense | c.1743G > T | p.Trp581Cys |
| 2:25244263:CCC | NA | frameshift | c.1741_1742dupTG | p.Trp581fs |
| A | | | | |
| 2:25244263:C:G | rs769419803 | missense | c.1743G > C | p.Trp581Cys |
| 2:25244263:C:T | rs769419803 | stop_gained | c.1743G > A | p.Trp581* |
| 2:25244264:C:A | NA | missense | c.1742G > T | p.Trp581Leu |
| 2:25244264:C:G | NA | missense | c.1742G > C | p.Trp581Ser |
| 2:25244264:C:T | rs1050697275 | stop_gained | c.1742G > A | p.Trp581* |
| 2:25244264:CA:C | NA | frameshift | c.1741delT | p.Trp581fs |
| 2:25244264:CAG | NA | frameshift | c.1738_1741delCC | p.Pro580fs |
| GG:C | | | CT | |
| 2:25244264:CAG | NA | inframe_indel | c.1721_1741delCA | p.Ala574_Trp581 |
| GGGTCTTCCTTAA | | | GCCATTAAGGAAG | delinsGly |
| TGGCTG:C | | | ACCCCT | |
| 2:25244265:A:AG | NA | frameshift | c.1740dupC | p.Trp581fs |
| 2:25244265:A:AG | NA | frameshift | c.1739_1740dupCC | p.Trp581fs |
| G | | | | |
| 2:25244265:A:C | rs1342803588 | missense | c.1741T > G | p.Trp581Gly |
| 2:25244265:A:G | NA | missense | c.1741T > C | p.Trp581Arg |
| 2:25244265:A:T | NA | missense | c.1741T > A | p.Trp581Arg |
| 2:25244265:AG:A | NA | frameshift | c.1740delC | p.Trp581fs |
| 2:25244266:GGG | NA | frameshift | c.1730_1739delAG | p.Lys577fs |
| GTCTTCCT:G | | | GAAGACCC | |
| 2:25244266:GGG | NA | frameshift | c.1718_1739delAG | p.Gln573fs |
| GTCTTCCTTAATG | | | GCAGCCATTAAGGA | |
| GCTGCCT:G | | | AGACCC | |
| 2:25244267:G:A | rs773048923 | missense | c.1739C > T | p.Pro580Leu |
| 2:25244267:G:T | NA | missense | c.1739C > A | p.Pro580His |
| 2:25244267:GGG | NA | frameshift | c.1735_1738delGA | p.Asp579fs |
| TC:G | | | CC | |
| 2:25244268:G:A | NA | missense | c.1738C > T | p.Pro580Ser |
| 2:25244269:GT:G | NA | frameshift | c.1736delA | p.Asp579fs |
| 2:25244269:GTCT | NA | frameshift | c.1732_1736delGA | p.Glu578fs |
| TC:G | | | AGA | |
| 2:25244270:T:A | NA | missense | c.1736A > T | p.Asp579Val |
| 2:25244270:T:C | NA | missense | c.1736A > G | p.Asp579Gly |
| 2:25244270:TCTT | NA | frameshift | c.1732_1735delGA | p.Glu578fs |
| C:T | | | AG | |
| 2:25244270:TCTT | NA | frameshift | c.1720_1735delGC | p.Ala574fs |
| CCTTAATGGCTGC: | | | AGCCATTAAGGAA | |
| T | | | G | |
| 2:25244271:C:A | NA | missense | c.1735G > T | p.Asp579Tyr |
| 2:25244271:C:CT | NA | frameshift | c.1734dupA | p.Asp579fs |
| 2:25244271:C:T | NA | missense | c.1735G > A | p.Asp579Asn |
| 2:25244271:CT:C | NA | frameshift | c.1734delA | p.Asp579fs |
| 2:25244272:T:TA | NA | frameshift | c.1733_1734insGT | p.Asp579fs |
| GAC | | | CT | |
| 2:25244272:TTC:T | NA | frameshift | c.1732_1733delGA | p.Glu578fs |
| 2:25244272:TTCC: | NA | inframe_indel | c.1731_1733delGG | p.Glu578del |
| T | | | A | |
| 2:25244273:T:C | NA | missense | c.1733A > G | p.Glu578Gly |
| 2:25244273:T:TC | NA | frameshift | c.1732dupG | p.Glu578fs |
| 2:25244273:TC:T | NA | frameshift | c.1732delG | p.Glu578fs |
| 2:25244273:TCC:T | NA | frameshift | c.1731_1732delGG | p.Glu578fs |
| 2:25244273:TCCT | NA | inframe_indel | c.1721_1732delCA | p.Ala574_Lys577 |
| TAATGGCTG:T | | | GCCATTAAGG | del |
| 2:25244274:C:A | NA | stop_gained | c.1732G > T | p.Glu578* |
| 2:25244275:C:CT | NA | frameshift | c.1730dupA | p.Glu578fs |
| 2:25244275:CTTA | NA | frameshift | c.1727_1730delTT | p.Ile576fs |
| A:C | | | AA | |
| 2:25244277:T:TA | NA | frameshift | c.1728dupT | p.Lys577fs |
| 2:25244277:TA:T | NA | frameshift | c.1728delT | p.Lys577fs |
| 2:25244278:AATG | NA | inframe_indel | c.1719_1727delGG | p.Gln573_Ile576 |
| GCTGCC:A | | | CAGCCAT | delinsHis |
| 2:25244278:AATG | NA | frameshift | c.1706_1727delCG | p.Pro569fs |
| GCTGCCTGGGCA | | | GGGGCTGCCCAGG | |
| GCCCCCG:A | | | CAGCCAT | |
| 2:25244279:A:C | rs1247716811 | missense | c.1727T > G | p.Ile576Ser |
| 2:25244279:A:G | NA | missense | c.1727T > C | p.Ile576Thr |
| 2:25244279:A:T | NA | missense | c.1727T > A | p.Ile576Asn |
| 2:25244279:AT:A | NA | frameshift | c.1726delA | p.Ile576fs |
| 2:25244279:ATG | NA | frameshift | c.1719_1726delGG | p.Gln573fs |
| GCTGCC:A | | | CAGCCA | |
| 2:25244279:ATG | NA | frameshift | c.1711_1726delGC | p.Ala571fs |
| GCTGCCTGGGCA | | | TGCCCAGGCAGCCA | |
| GC:A | | | | |
| 2:25244280:T:C | NA | missense | c.1726A > G | p.Ile576Val |
| 2:25244280:T:G | NA | missense | c.1726A > C | p.Ile576Leu |
| 2:25244280:T:TA | NA | frameshift | c.1725_1726insTT | p.Ile576fs |
| A | | | | |
| 2:25244280:TG:T | NA | frameshift | c.1725delC | p.Ile576fs |
| 2:25244280:TGGC | NA | frameshift | c.1709_1725delGG | p.Gly570fs |
| TGCCTGGGCAGCC | | | GCTGCCCAGGCAGC | |
| C:T | | | C | |
| 2:25244280:TGGC | rs770302280 | frameshift | c.1707_1725delGG | p.Gly570fs |
| TGCCTGGGCAGCC | | | GGGCTGCCCAGGC | |
| CCC:T | | | AGCC | |
| 2:25244281:GGCT | NA | inframe_indel | c.1719_1724delGG | p.Gln573_Ala575 |
| GCC:G | | | CAGC | delinsHis |
| 2:25244281:GGCT | NA | inframe_indel | c.1713_1724delTG | p.Ala572_Ala575 |
| GCCTGGGCA:G | | | CCCAGGCAGC | del |
| 2:25244281:GGCT | NA | inframe_indel | c.1707_1724delGG | p.Gly570_Ala575 |
| GCCTGGGCAGCC | | | GGGCTGCCCAGGC | del |
| CCC:G | | | AGC | |
| 2:25244282:G:A | NA | missense | c.1724C > T | p.Ala575Val |
| 2:25244282:GCTG | NA | frameshift | c.1711_1723delGC | p.Ala571fs |
| CCTGGGCAGC:G | | | TGCCCAGGCAG | |
| 2:25244282:GCTG | NA | frameshift | c.1710_1723delGG | p.Ala571fs |
| CCTGGGCAGCCIG | | | CTGCCCAGGCAG | |
| 2:25244282:GCTG | NA | inframe_indel | c.1709_1723delGG | p.Gly570_Ala574 |
| CCTGGGCAGCCC: | | | GCTGCCCAGGCAG | del |
| G | | | | |
| 2:25244282:GCTG | NA | frameshift | c.1698_1723delGG | p.Leu566fs |
| CCTGGGCAGCCCC | | | TGGGGCCGGGGGC | |
| CGGCCCCACC:G | | | TGCCCAGGCAG | |
| 2:25244283:C:G | NA | missense | c.1723G > C | p.Ala575Pro |
| 2:25244283:CT:C | NA | frameshift | c.1722delA | p.Ala575fs |
| 2:25244284:TG:T | NA | frameshift | c.1721delC | p.Ala574fs |
| 2:25244284:TGCC | rs773643031 | inframe_indel | c.1713_1721delTG | p.Ala572_Ala574 |
| TGGGCA:T | | | CCCAGGC | del |
| 2:25244284:TGCC | NA | inframe_indel | c.1710_1721delGG | p.Ala571_Ala574 |
| TGGGCAGCC:T | | | CTGCCCAGGC | del |
| 2:25244284:TGCC | NA | inframe_indel | c.1707_1721delGG | p.Gly570_Ala574 |
| TGGGCAGCCCCC: | | | GGGCTGCCCAGGC | del |
| T | | | | |
| 2:25244285:GC:G | NA | frameshift | c.1720delG | p.Ala574fs |
| 2:25244285:GCCT | NA | frameshift | c.1711_1720delGC | p.Ala571fs |
| GGGCAGC:G | | | TGCCCAGG | |
| 2:25244285:GCCT | NA | frameshift | c.1710_1720delGG | p.Ala571fs |
| GGGCAGCC:G | | | CTGCCCAGG | |
| 2:25244286:C:T | NA | missense | c.1720G > A | p.Ala574Thr |
| 2:25244286:CCTG | NA | frameshift | c.1712_1719delCT | p.Ala571fs |
| GGCAG:C | | | GCCCAG | |
| 2:25244286:CCTG | NA | frameshift | c.1706_1719delCG | p.Pro569fs |
| GGCAGCCCCCG:C | | | GGGGCTGCCCAG | |
| 2:25244287:C:A | | missense | c.1719G > T | p.Gln573His |
| 2:25244287:C:CC | NA | frameshift | c.1718_1719insTG | p.Gln573fs |
| A | | | | |
| 2:25244287:CTGG: | NA | inframe_indel | c.1716_1718delCC | p.Gln573del |
| C | | | A | |
| 2:25244287:CTGG | rs763053459 | frameshift | c.1712_1718delCT | p.Ala571fs |
| GCAG:C | | | GCCCA | |
| 2:25244288:T:C | NA | missense | c.1718A > G | p.Gln573Arg |
| 2:25244288:TG:T | NA | frameshift | c.1717delC | p.Gln573fs |
| 2:25244288:TGG | NA | frameshift | c.1708_1717delGG | p.Gly570fs |
| GCAGCCCC:T | | | GGCTGCCC | |
| 2:25244289:G:A | rs902965419 | stop_gained | c.1717C > T | p.Gln573* |
| 2:25244289:G:GG | NA | frameshift | c.1716_1717insTG | p.Gln573fs |
| GCAGCCCCA | | | GGGCTGCC | |
| 2:25244289:GGG | NA | frameshift | c.1710_1716delGG | p.Ala571fs |
| CAGCC:G | | | CTGCC | |
| 2:25244289:GGG | NA | frameshift | c.1707_1716delGG | p.Gly570fs |
| CAGCCCCC:G | | | GGGCTGCC | |
| 2:25244290:G:GG | NA | inframe_indel | c.1713_1715dupTG | p.Ala572dup |
| CA | | | C | |
| 2:25244290:GGC: | NA | frameshift | c.1714_1715delGC | p.Ala572fs |
| G | | | | |
| 2:25244290:GGC | rs1351573938 | inframe_indel | c.1713_1715delTG | p.Ala572del |
| A:G | | | C | |
| 2:25244290:GGC | NA | frameshift | c.1711_1715delGC | p.Ala571fs |
| AGC:G | | | TGC | |
| 2:25244290:GGC | NA | frameshift | c.1708_1715delGG | p.Gly570fs |
| AGCCCC:G | | | GGCTGC | |
| 2:25244291:G:T | NA | missense | c.1715C > A | p.Ala572Asp |
| 2:25244291:GCA | NA | inframe_indel | c.1709_1714delGG | p.Gly570_Ala571 |
| GCCC:G | | | GCTG | del |
| 2:25244292:C:T | NA | missense | c.1714G > A | p.Ala572Thr |
| 2:25244292:CA:C | NA | frameshift | c.1713delT | p.Ala572fs |
| 2:25244293:AG:A | NA | frameshift | c.1712delC | p.Ala571fs |
| 2:25244294:G:GC | | frameshift | c.1711dupG | p.Ala571fs |
| 2:25244294:G:T | NA | missense | c.1712C > A | p.Ala571Asp |
| 2:25244294:GCG | | frameshift | c.1711delG | p.Ala571fs |
| 2:25244295:c.G | NA | missense | c.1711G > C | p.Ala571Pro |
| 2:25244295:C:T | NA | missense | c.1711G > A | p.Ala571Thr |
| 2:25244297:C:A | NA | missense | c.1709G > T | p.Gly570Val |
| 2:25244297:C:G | NA | missense | c.1709G > C | p.Gly570Ala |
| 2:25244297:C:T | NA | missense | c.1709G > A | p.Gly570Glu |
| 2:25244298:C:T | NA | missense | c.1708G > A | p.Gly570Arg |
| 2:25244300:G:A | rs772310511 | missense | c.1706C > T | p.Pro569Leu |
| 2:25244300:G:C | NA | missense | c.1706C > G | p.Pro569Arg |
| 2:25244301:G:GC | NA | frameshift | c.1704_1705insTG | p.Pro569fs |
| A | | | | |
| 2:25244301:GC:G | NA | frameshift | c.1704delG | p.Pro569fs |
| 2:25244301:GCC: | NA | frameshift | c.1703_1704delGG | p.Gly568fs |
| G | | | | |
| 2:25244301:GCCC | NA | frameshift | c.1682_1704delAG | p.Glu561fs |
| CACCAAGAGGTCC | | | TGTGTGGACCTCTT | |
| ACACACT:G | | | GGTGGGG | |
| 2:25244302:CCCC | NA | frameshift | c.1700_1703delTG | p.Va1567fs |
| A:C | | | GG | |
| 2:25244303:C:T | NA | missense | c.1703G > A | p.Gly568Glu |
| 2:25244303:CCCA: | rs1361235617 | inframe_indel | c.1700_1702delTG | p.Va1567del |
| C | | | G | |
| 2:25244304:CCAC | NA | frameshift | c.1688_1701delTG | p.Va1563fs |
| CAAGAGGTCCA:C | | | GACCTCTTGGTG | |
| 2:25244305:CA:C | NA | frameshift | c.1700delT | p.Va1567fs |
| 2:25244306:A:AC | NA | frameshift | c.1699dupG | p.Va1567fs |
| 2:25244306:AC:A | NA | frameshift | c.1699delG | p.Va1567fs |
| 2:25244307:CCAA | NA | frameshift | c.1695_1698delCTT | p.Leu566fs |
| G:C | | | G | |
| 2:25244308:C:CA | NA | frameshift | c.1694_1697dupTC | p.Leu566fs |
| AGA | | | TT | |
| 2:25244308:CCC | NA | frameshift | c.1697_1698insTG | p.Leu566fs |
| A | | | | |
| 2:25244308:CA:C | NA | frameshift | c.1697delT | p.Leu566fs |
| 2:25244309:A:T | NA | stop_gained | c.1697T > A | p.Leu566* |
| 2:25244311:GA:G | NA | frameshift | c.1694delT | p.Leu565fs |
| 2:25244312:A:G | rs1040053651 | missense | c.1694T > C | p.Leu565Pro |
| 2:25244312:AG:A | rs1303060010 | frameshift | c.1693delC | p.Leu565fs |
| 2:25244312:AGG | NA | frameshift | c.1690_1693delGA | p.Asp564fs |
| TC:A | | | CC | |
| 2:25244314:G:GT | NA | frameshift | c.1687_1691dupGT | p.Asp564fs |
| CCAC | | | GGA | |
| 2:25244314:GT:G | NA | frameshift | c.1691delA | p.Asp564fs |
| 2:25244315:T:TC | NA | frameshift | c.1690dupG | p.Asp564fs |
| 2:25244315:TC:T | NA | frameshift | c.1690delG | p.Asp564fs |
| 2:25244315:TCC:T | NA | frameshift | c.1689_1690delGG | p.Asp564fs |
| 2:25244315:TCCA | NA | inframe_indel | c.1679_1690delTG | p.Va1560_Va1563 |
| CACACTCCA:T | | | GAGTGTGTGG | del |
| 2:25244315:TCCA | NA | frameshift | c.1669_1690delTG | p.Cys557fs |
| CACACTCCACGCA | | | CTTTTGCGTGGAGT | |
| AAAGCA:T | | | GTGTGG | |
| 2:25244316:C:CC | NA | frameshift | c.1688_1689dupTG | p.Asp564fs |
| A | | | | |
| 2:25244316:C:CC | NA | frameshift | c.1686_1689dupTG | p.Asp564fs |
| ACA | | | TG | |
| 2:25244316:CCA: | NA | frameshift | c.1688_1689delTG | p.Va1563fs |
| C | | | | |
| 2:25244317:C:CA | NA | frameshift | c.1688dupT | p.Asp564fs |
| 2:25244318:A:AC | NA | frameshift | c.1681_1687dupG | p.Va1563fs |
| ACACTC | | | AGTGTG | |
| 2:25244318:A:T | NA | missense | c.1688T > A | p.Va1563Glu |
| 2:25244318:AC:A | NA | frameshift | c.1687delG | p.Va1563fs |
| 2:25244318:ACAC | NA | frameshift | c.1677_1687delCG | p.Va1560fs |
| ACTCCACG:A | | | TGGAGTGTG | |
| 2:25244319:C:T | rs1299203502 | missense | c.1687G > A | p.Va1563Met |
| 2:25244319:CA:C | NA | frameshift | c.1686delT | p.Cys562fs |
| 2:25244320:ACAC | NA | frameshift | c.1678_1685delGT | p.Va1560fs |
| TCCAC:A | | | GGAGTG | |
| 2:25244321:C:A | rs1218552501 | missense | c.1685G > T | p.Cys562Phe |
| 2:25244321:C:G | NA | missense | c.1685G > C | p.Cys562Ser |
| 2:25244321:C:T | rs1218552501 | missense | c.1685G > A | p.Cys562Tyr |
| 2:25244321:CA:C | NA | frameshift | c.1684delT | p.Cys562fs |
| 2:25244322:A:G | rs1057520788 | missense | c.1684T > C | p.Cys562Arg |
| 2:25244322:AC:A | NA | frameshift | c.1683delG | p.Glu561fs |
| 2:25244322:ACTC | NA | frameshift | c.1671_1683delCTT | p.Phe558fs |
| CACGCAAAAG:A | | | TTGCGTGGAG | |
| 2:25244324:TC:T | NA | frameshift | c.1681delG | p.Glu561fs |
| 2:25244324:TCCA | NA | frameshift | c.1677_1681delCG | p.Cys559fs |
| CG:T | | | TGG | |
| 2:25244324:TCCA | NA | frameshift | c.1671_1681delCTT | p.Cys557fs |
| CGCAAAAG:T | | | TTGCGTGG | |
| 2:25244325:C:A | NA | stop_gained | c.1681G > T | p.Glu561* |
| 2:25244325:CCA: | NA | frameshift | c.1679_1680delTG | p.Va1560fs |
| C | | | | |
| 2:25244325:CCAC | NA | frameshift | c.1677_1680delCG | p.Cys559fs |
| G:C | | | TG | |
| 2:25244326:CA:C | NA | frameshift | c.1679delT | p.Va1560fs |
| 2:25244327:AC:A | NA | frameshift | c.1678delG | p.Va1560fs |
| 2:25244327:ACGC | NA | frameshift | c.1671_1678delCTT | p.Phe558fs |
| AAAAG:A | | | TTGCG | |
| 2:25244328:CG:C | NA | frameshift | c.1677delC | p.Cys559fs |
| 2:25244329:G:C | NA | missense | c.1677C > G | p.Cys559Trp |
| 2:25244329:G:T | NA | stop_gained | c.1677C > A | p.Cys559* |
| 2:25244329:GCA | NA | frameshift | c.1669_1676delTG | p.Cys557fs |
| AAAGCA:G | | | CHUG | |
| 2:25244329:GCA | NA | inframe_indel | c.1668_1676delGT | p.Arg556_Cys559 |
| AAAGCAC:G | | | GCTTTTG | delinsSer |
| 2:25244330:C:A | rs1313738991 | missense | c.1676G > T | p.Cys559Phe |
| 2:25244330:C:CA | NA | frameshift | c.1675dupT | p.Cys559fs |
| 2:25244330:C:T | NA | missense | c.1676G > A | p.Cys559Tyr |
| 2:25244330:CA:C | NA | frameshift | c.1675delT | p.Cys559fs |
| 2:25244330:CAA: | NA | frameshift | c.1674_1675delTT | p.Phe558fs |
| C | | | | |
| 2:25244331:A:G | NA | missense | c.1675T > C | p.Cys559Arg |
| 2:25244333:A:C | NA | missense | c.1673T > G | p.Phe558Cys |
| 2:25244333:AAG: | NA | frameshift | c.1671_1672delCT | p.Phe558fs |
| A | | | | |
| 2:25244335:G:T | NA | stop_gained | c.1671C > A | p.Cys557* |
| 2:25244336:C:T | NA | missense | c.1670G > A | p.Cys557Tyr |
| 2:25244336:CA:C | NA | frameshift | c.1669delT | p.Cys557fs |
| 2:25244336:CACC | NA | frameshift | c.1668- | p.Cys557fs |
| TGGAA:C | | | 6_1669delTTCCAG | |
| | | | GT | |
| 2:25244337:A:C | rs760791871 | missense | c.1669T > G | p.Cys557Gly |
| 2:25244337:A:G | NA | missense | c.1669T > C | p.Cys557Arg |
| 2:25244337:AC:A | rs1267683924 | frameshift | c.1668delG | p.Arg556fs |
| 2:25244337: ACC: | NA | frameshift | c.1668- | p.Arg556fs |
| A | | | 1_1668delGG | |
| 2:25244338:C:A | NA | missense | c.1668G > T | p.Arg556Ser |
| 2:25244338:C:G | NA | missense | c.1668G > C | p.Arg556Ser |
| 2:25244339:C:A | NA | splice_acceptor | c.1668-1G > T | |
| 2:25244339:C:G | NA | splice_acceptor | c.1668-1G > C | |
| 2:25244339:C:T | NA | splice_acceptor | c.1668-1G > A | |
| 2:25244339:CT:C | NA | splice_acceptor | c.1668-2delA | |
| 2:25244339:CTGG | NA | splice_acceptor | c.1668-6_1668- | |
| AA:C | | | 2delTTCCA | |
| 2:25244340:T:C | rs764270325 | splice_acceptor | c.1668-2A > G | |
| 2:25244340:T:G | NA | splice_acceptor | c.1668-2A > C | |
| 2:25244530:ACA | NA | splice_donor | c.1665_1667+9del | p.Cys555_Arg556 |
| GCCTCACCTG:A | | | CAGGTGAGGCTG | delinsTrp |
| 2:25244538:A:C | NA | splice_donor | c.1667+2T > G | |
| 2:25244538:A:G | NA | splice_donor | c.1667+2T > C | |
| 2:25244538:A:T | NA | splice_donor | c.1667+2T > A | |
| 2:25244539:C:A | rs776844136 | splice_donor | c.1667+1G > T | |
| 2:25244539:C:G | rs776844136 | splice_donor | c.1667+1G > C | |
| 2:25244539:C:T | rs776844136 | splice_donor | c.1667+1G > A | |
| 2:25244540:C:CT | NA | frameshift | c.1663_1666dupTG | p.Arg556fs |
| GCA | | | CA | |
| 2:25244540:C:G | rs1162120698 | missense | c.1667G > C | p.Arg556Thr |
| 2:25244540:CT:C | NA | frameshift | c.1666delA | p.Arg556fs |
| 2:25244541:T:A | NA | missense | c.1666A > T | p.Arg556Trp |
| 2:25244541:T:C | rs770311493 | missense | c.1666A > G | p.Arg556Gly |
| 2:25244542:G:T | NA | stop_gained | c.1665C > A | p.Cys555* |
| 2:25244543:C:CA | NA | frameshift | c.1663dupT | p.Cys555fs |
| 2:25244543:CA:C | NA | frameshift | c.1663delT | p.Cys555fs |
| 2:25244544:A:G | NA | missense | c.1663T > C | p.Cys555Arg |
| 2:25244545:G:T | NA | stop_gained | c.1662C > A | p.Cys554* |
| 2:25244546:CAG: | NA | frameshift | c.1659_1660delCT | p.Asn553fs |
| C | | | | |
| 2:25244547:A:C | NA | missense | c.1660T > G | p.Cys554Gly |
| 2:25244547:A:G | NA | missense | c.1660T > C | p.Cys554Arg |
| 2:25244547:AGT: | NA | frameshift | c.1658_1659delAC | p.Asn553fs |
| A | | | | |
| 2:25244547:AGTT | NA | frameshift | c.1656_1659delCA | p.Asn553fs |
| G:A | | | AC | |
| 2:25244548:G:C | NA | missense | c.1659C > G | p.Asn553Lys |
| 2:25244548:G:T | NA | missense | c.1659C > A | p.Asn553Lys |
| 2:25244548:GT:G | NA | frameshift | c.1658delA | p.Asn553fs |
| 2:25244548:GTT: | NA | frameshift | c.1657_1658delAA | p.Asn553fs |
| G | | | | |
| 2:25244549:T:TT | NA | frameshift | c.1657_1658insCA | p.Asn553fs |
| GTGTTG | | | ACACA | |
| 2:25244550:TG:T | NA | frameshift | c.1656delC | p.Asn552fs |
| 2:25244551:GT:G | rs1229047002 | frameshift | c.1655delA | p.Asn552fs |
| 2:25244551:GTTG | NA | frameshift | c.1652_1655delAC | p.Asn551fs |
| T:G | | | AA | |
| 2:25244554:G:GT | NA | frameshift | c.1652dupA | p.Asn551fs |
| 2:25244556:TTCC | NA | frameshift | c.1635_1650delGG | p.Va1546fs |
| GCACATGAGCACC | | | TGCTCATGTGCGGA | |
| T | | | | |
| 2:25244557:TC:T | NA | frameshift | c.1649delG | p.Gly550fs |
| 2:25244557:TCCG | NA | stop_gained | c.1647_1649delCG | p.Cys549_Gly550 |
| T | | | G | delinsTer |
| 2:25244557:TCCG | NA | frameshift | c.1637_1649delTG | p.Va1546fs |
| CACATGAGCA:T | | | CTCATGTGCGG | |
| 2:25244559:C:A | rs763336898 | stop_gained | c.1648G > T | p.Gly550* |
| 2:25244559:C:G | NA | missense | c.1648G > C | p.Gly550Arg |
| 2:25244559:C:T | rs763336898 | missense | c.1648G > A | p.Gly550Arg |
| 2:25244559:CGCA | NA | frameshift | c.1640_1647delTC | p.Leu547fs |
| CATGA:C | | | ATGTGC | |
| 2:25244560:G:C | NA | missense | c.1647C > G | p.Cys549Trp |
| 2:25244560:G:T | NA | stop_gained | c.1647C > A | p.Cys549* |
| 2:25244561:C:T | NA | missense | c.1646G > A | p.Cys549Tyr |
| 2:25244561:CA:C | NA | frameshift | c.1645delT | p.Cys549fs |
| 2:25244562:A:AC | rs1397787959 | frameshift | c.1644dupG | p.Cys549fs |
| 2:25244562:A:AC | NA | frameshift | c.1644_1645insCG | p.Cys549fs |
| G | | | | |
| 2:25244562:A:G | NA | missense | c.1645T > C | p.Cys549Arg |
| 2:25244563:C:A | NA | missense | c.1644G > T | p.Met548Ile |
| 2:25244563:C:T | rs1403215240 | missense | c.1644G > A | p.Met548Ile |
| 2:25244563:CAT: | rs1307594893 | frameshift | c.1642_1643delAT | p.Met548fs |
| C | | | | |
| 2:25244564:A:C | NA | missense | c.1643T > G | p.Met548Arg |
| 2:25244564:A:G | NA | missense | c.1643T > C | p.Met548Thr |
| 2:25244564:A:T | rs587777509 | missense | c.1643T > A | p.Met548Lys |
| 2:25244565:T:C | NA | missense | c.1642A > G | p.Met548Val |
| 2:25244566:GAG | NA | frameshift | c.1607_1640delAC | p.Tyr536fs |
| CACCTCACGGCCC | | | TGCACCATCTGCTG | |
| CCACAGCAGATG | | | TGGGGGCCGTGAG | |
| GTGCAGT:G | | | GTGCT | |
| 2:25244567:A:C | rs111848085 | missense | c.1640T > G | p.Leu547Arg |
| 2:25244567:A:G | rs111848085 | missense | c.1640T > C | p.Leu547Pro |
| 2:25244567:A:T | rs111848085 | missense | c.1640T > A | p.Leu547His |
| 2:25244568:G:A | rs759176128 | missense | c.1639C > T | p.Leu547Phe |
| 2:25244568:G:GA | NA | frameshift | c.1638_1639insT | p.Leu547fs |
| 2:25244570:AC:A | NA | frameshift | c.1636delG | p.Va1546fs |
| 2:25244573:T:TC | NA | frameshift | c.1603_1633dupTC | p.Glu545fs |
| ACGGCCCCCACAG | | | CTACTGCACCATCT | |
| CAGATGGTGCAG | | | GCTGTGGGGGCCG | |
| TAGGA | | | TG | |
| 2:25244573:TC:T | NA | frameshift | c.1633delG | p.Glu545fs |
| 2:25244574:C:A | NA | stop_gained | c.1633G > T | p.Glu545* |
| 2:25244574:C:CA | NA | frameshift | c.1632dupT | p.Glu545fs |
| 2:25244575:AC:A | NA | frameshift | c.1631delG | p.Arg544fs |
| 2:25244576:CG:C | NA | frameshift | c.1630delC | p.Arg544fs |
| 2:25244577:GGC | NA | frameshift | c.1625_1629delGG | p.Gly542fs |
| CCC:G | | | GGC | |
| 2:25244578:G:GC | rs1164367418 | frameshift | c.1628dupG | p.Arg544fs |
| 2:25244578:G:GC | NA | frameshift | c.1627_1628dupG | p.Arg544fs |
| C | | | G | |
| 2:25244578:GC:G | rs1392385564 | frameshift | c.1628delG | p.Gly543fs |
| 2:25244579:C:A | rs767226511 | missense | c.1628G > T | p.Gly543Val |
| 2:25244579:C:G | rs767226511 | missense | c.1628G > C | p.Gly543Ala |
| 2:25244579:C:T | rs767226511 | missense | c.1628G > A | p.Gly543Asp |
| 2:25244580:C:A | rs752222356 | missense | c.1627G > T | p.Gly543Cys |
| 2:25244580:C:T | NA | missense | c.1627G > A | p.Gly543Ser |
| 2:25244582:C:CC | NA | frameshift | c.1624_1625insCCC | p.Gly542fs |
| ACAGCAGATGGT | | | TACTGCACCATCTG | |
| GCAGTAGGG | | | CTGTG | |
| 2:25244584:A:T | NA | stop_gained | c.1623T > A | p.Cys541* |
| 2:25244585:CA:C | NA | frameshift | c.1621delT | p.Cys541fs |
| 2:25244586:A:AG | NA | frameshift | c.1620dupC | p.Cys541fs |
| 2:25244586:AGC | NA | frameshift | c.1610_1620delGC | p.Cys537fs |
| AGATGGTGC:A | | | ACCATCTGC | |
| 2:25244586:AGC | NA | frameshift | c.1605_1620delCT | p.Tyr536fs |
| AGATGGTGCAGT | | | ACTGCACCATCTGC | |
| AG:A | | | | |
| 2:25244587:G:T | NA | stop_gained | c.1620C > A | p.Cys540* |
| 2:25244588:C:CA | rs1438581688 | frameshift | c.1618dupT | p.Cys540fs |
| 2:25244588:CA:C | rs1366761466 | frameshift | c.1618delT | p.Cys540fs |
| 2:25244588:CAG | NA | frameshift | c.1615_1618delAT | p.Ile539fs |
| AT:C | | | CT | |
| 2:25244588:CAG | NA | frameshift | c.1608_1618delCT | p.Tyr536fs |
| ATGGTGCAG:C | | | GCACCATCT | |
| 2:25244589:AG:A | NA | frameshift | c.1617delC | p.Cys540fs |
| 2:25244589:AGAT | NA | frameshift | c.1614_1617delCA | p.Ile539fs |
| G:A | | | TC | |
| 2:25244590:GA:G | NA | frameshift | c.1616delT | p.Ile539fs |
| 2:25244592:T:TG | NA | frameshift | c.1614dupC | p.Ile539fs |
| 2:25244592:TG:T | rs1291735877 | frameshift | c.1614delC | p.Ile539fs |
| 2:25244592:TGG: | NA | frameshift | c.1613_1614delCC | p.Thr538fs |
| T | | | | |
| 2:25244593:G:GG | NA | frameshift | c.1612_1613dupAC | p.Ile539fs |
| T | | | | |
| 2:25244593:G:GT | NA | frameshift | c.1613_1614insGT | p.Ile539fs |
| GCAC | | | GCA | |
| 2:25244596:G:C | NA | missense | c.1611C > G | p.Cys537Trp |
| 2:25244596:G:GC | NA | frameshift | c.1609_1610dupTG | p.Thr538fs |
| A | | | | |
| 2:25244596:G:T | NA | stop_gained | c.1611C > A | p.Cys537* |
| 2:25244596:GC:G | NA | frameshift | c.1610delG | p.Cys537fs |
| 2:25244597:C:A | NA | missense | c.1610G > T | p.Cys537Phe |
| 2:25244597:C:T | NA | missense | c.1610G > A | p.Cys537Tyr |
| 2:25244598:A:C | NA | missense | c.1609T > G | p.Cys537Gly |
| 2:25244598:A:G | NA | missense | c.1609T > C | p.Cys537Arg |
| 2:25244598:A:T | NA | missense | c.1609T > A | p.Cys537Ser |
| 2:25244598:AG:A | NA | frameshift | c.1608delC | p.Cys537fs |
| 2:25244599:G:C | rs370376334 | stop_gained | c.1608C > G | p.Tyr536* |
| 2:25244599:G:GT | NA | frameshift | c.1607dupA | p.Tyr536fs |
| 2:25244599:G:T | NA | stop_gained | c.1608C > A | p.Tyr536* |
| 2:25244599:GT:G | rs759716976 | frameshift | c.1607delA | p.Tyr536fs |
| 2:25244600:T:TA | NA | frameshift | c.1603_1606dupTC | p.Tyr536fs |
| GGA | | | CT | |
| 2:25244600:TAG: | NA | frameshift | c.1605_1606delCT | p.Tyr536fs |
| T | | | | |
| 2:25244601:AG:A | rs767775447 | frameshift | c.1605delC | p.Tyr536fs |
| 2:25244601:AGG | NA | frameshift | c.1598_1605delAC | p.Tyr533fs |
| ACTGGT:A | | | CAGTCC | |
| 2:25244602:G:GG | NA | frameshift | c.1603_1604dupTC | p.Tyr536fs |
| A | | | | |
| 2:25244602:G:GG | NA | frameshift | c.1601_1604dupA | p.Tyr536fs |
| ACT | | | GTC | |
| 2:25244604:AC:A | NA | frameshift | c.1602delG | p.Gln534fs |
| 2:25244605:CTGG: | NA | stop_gained | c.1599_1601delCC | p.Tyr533_Gln534 |
| C | | | A | delinsTer |
| 2:25244606:TG:T | NA | frameshift | c.1600delC | p.Gln534fs |
| 2:25244607:G:A | rs1167876410 | stop_gained | c.1600C > T | p.Gln534* |
| 2:25244608:G:C | rs757057121 | stop_gained | c.1599C > G | p.Tyr533* |
| 2:25244608:G:GT | NA | frameshift | c.1576_1598dupTA | p.Gln534fs |
| AGCCGTCGTCGTC | | | CCAGTACGACGACG | |
| GTACTGGTA | | | ACGGCTA | |
| 2:25244608:G:T | rs757057121 | stop_gained | c.1599C > A | p.Tyr533* |
| 2:25244608:GT:G | NA | frameshift | c.1598delA | p.Tyr533fs |
| 2:25244609:TA:T | NA | frameshift | c.1597delT | p.Tyr533fs |
| 2:25244610:AG:A | NA | frameshift | c.1596delC | p.Tyr533fs |
| 2:25244612:C:A | NA | missense | c.1595G > T | p.Gly532Val |
| 2:25244613:C:CG | NA | frameshift | c.1592_1593dupAC | p.Gly532fs |
| T | | | | |
| 2:25244613:C:T | rs951361433 | missense | c.1594G > A | p.Gly532Ser |
| 2:25244613:CG:C | rs1329318931 | frameshift | c.1593delC | p.Asp531fs |
| 2:25244614:GT:G | NA | frameshift | c.1592delA | p.Asp531fs |
| 2:25244615:TC:T | NA | frameshift | c.1591delG | p.Asp531fs |
| 2:25244616:C:T | rs745721709 | missense | c.1591G > A | p.Asp531Asn |
| 2:25244616:CG:C | NA | frameshift | c.1590delC | p.Asp530fs |
| 2:25244617:G:GC | NA | frameshift | c.1589_1590insG | p.Asp530fs |
| 2:25244617:GTCG | NA | frameshift | c.1582_1589delTA | p.Tyr528fs |
| TCGTA:G | | | CGACGA | |
| 2:25244621:TCGT | NA | frameshift | c.1582_1585delTA | p.Tyr528fs |
| A:T | | | CG | |
| 2:25244621:TCGT | NA | frameshift | c.1567_1585delGA | p.Glu523fs |
| ACTGGTACGCACA | | | GTGTGCGTACCAGT | |
| CTC:T | | | ACG | |
| 2:25244622:C:CG | NA | frameshift | c.1584dupC | p.Asp529fs |
| 2:25244622:C:T | rs962805778 | missense | c.1585G > A | p.Asp529Asn |
| 2:25244623:G:C | NA | stop_gained | c.1584C > G | p.Tyr528* |
| 2:25244623:G:T | NA | stop_gained | c.1584C > A | p.Tyr528* |
| 2:25244624:T:TA | NA | frameshift | c.1576_1582dupTA | p.Tyr528fs |
| CTGGTA | | | CCAGT | |
| 2:25244624:TACT | NA | frameshift | c.1576_1582delTA | p.Tyr526fs |
| GGTA:T | | | CCAGT | |
| 2:25244625:A:AC | NA | frameshift | c.1581dupG | p.Tyr528fs |
| 2:25244625:AC:A | NA | frameshift | c.1581delG | p.Gln527fs |
| 2:25244625:ACTG | NA | frameshift | c.1578_1581delCC | p.Gln527fs |
| G:A | | | AG | |
| 2:25244626:C:A | NA | missense | c.1581G > T | p.Gln527His |
| 2:25244626:C:G | NA | missense | c.1581G > C | p.Gln527His |
| 2:25244626:CT:C | NA | frameshift | c.1580delA | p.Gln527fs |
| 2:25244627:T:G | rs773701621 | missense | c.1580A > C | p.Gln527Pro |
| 2:25244627:TG:T | NA | frameshift | c.1579delC | p.Gln527fs |
| 2:25244628:G:A | rs1372858208 | stop_gained | c.1579C > T | p.Gln527* |
| 2:25244628:GGT | NA | splice_acceptor | c.1555- | p.Asn519_Gln527 |
| ACGCACACTCCAG | | | 3_1578delTAGAAC | del |
| AAAGCAGTTCTA: | | | TGCTTTCTGGAGTG | |
| G | | | TGCGTAC | |
| 2:25244629:G:C | rs763384327 | stop_gained | c.1578C > G | p.Tyr526* |
| 2:25244629:G:T | NA | stop_gained | c.1578C > A | p.Tyr526* |
| 2:25244629:GTAC | NA | frameshift | c.1571_1577delGT | p.Cys524fs |
| GCAC:G | | | GCGTA | |
| 2:25244629:GTAC | NA | frameshift | c.1567_1577delGA | p.Glu523fs |
| GCACACTC:G | | | GTGTGCGTA | |
| 2:25244631:AC:A | NA | frameshift | c.1575delG | p.Tyr526fs |
| 2:25244633:GC:G | NA | frameshift | c.1573delG | p.Ala525fs |
| 2:25244633:GCA: | rs765267873 | frameshift | c.1572_1573delTG | p.Ala525fs |
| G | | | | |
| 2:25244634:C:CA | NA | frameshift | c.1572dupT | p.Ala525fs |
| 2:25244634:CACA | NA | frameshift | c.1563_1572delTCT | p.Phe521fs |
| CTCCAGA:C | | | GGAGTGT | |
| 2:25244635:A:T | NA | stop_gained | c.1572T > A | p.Cys524* |
| 2:25244637:AC:A | rs1238915745 | frameshift | c.1569delG | p.Glu523fs |
| 2:25244638:CT:C | NA | frameshift | c.1568delA | p.Glu523fs |
| 2:25244639:TC:T | NA | frameshift | c.1567delG | p.Glu523fs |
| 2:25244640:C:A | NA | stop_gained | c.1567G > T | p.Glu523* |
| 2:25244641:CA:C | NA | frameshift | c.1565delT | p.Leu522fs |
| 2:25244643:G:GA | NA | frameshift | c.1563dupT | p.Leu522fs |
| 2:25244643:GA:G | NA | frameshift | c.1563delT | p.Leu522fs |
| 2:25244647:G:GC | NA | frameshift | c.1558_1559dupTG | p.Phe521fs |
| A | | | | |
| 2:25244647:G:T | rs774696234 | stop_gained | c.1560C > A | p.Cys520* |
| 2:25244647:GC:G | NA | frameshift | c.1559delG | p.Cys520fs |
| 2:25244648:C:CA | NA | frameshift | c.1558dupT | p.Cys520fs |
| 2:25244648:CA:C | NA | frameshift | c.1558delT | p.Cys520fs |
| 2:25244648:CAGT | NA | frameshift | c.1555- | p.Asn519fs |
| TCTAGACAGCAGC | | | 24_1558delCTGAC | |
| GGGAAGGGTCAG: | | | CCTTCCCGCTGCTG | |
| C | | | TCTAGAACT | |
| 2:25244650:GT:G | NA | frameshift | c.1556delA | p.Asn519fs |
| 2:25244652:T:TC | NA | splice_acceptor | c.1555-1dupG | |
| 2:25244653:C:G | rs759936287 | splice_acceptor | c.1555-1G > C | |
| 2:25244653:C:T | NA | splice_acceptor | c.1555-1G > A | |
| 2:25244654:T:A | NA | splice_acceptor | c.1555-2A > T | |
| 2:25244654:T:C | rs767136883 | splice_acceptor | c.1555-2A > G | |
| 2:25244654:T:G | rs767136883 | splice_acceptor | c.1555-2A > C | |
| 2:25245251:A:C | rs758228404 | splice_donor | c.1554+2T > G | |
| 2:25245251:A:G | NA | splice_donor | c.1554+2T > C | |
| 2:25245251:AC:A | NA | splice_donor | c.1554+1delG | |
| 2:25245252:C:A | NA | splice_donor | c.1554+1G > T | |
| 2:25245252:C:G | NA | splice_donor | c.1554+1G > C | |
| 2:25245252:C:T | rs766110518 | splice_donor | c.1554+1G > A | |
| 2:25245253:C:CTT | NA | frameshift | c.1547_1553dupAC | p.Asn519fs |
| GCAGT | | | TGCAA | |
| 2:25245255:T:A | NA | stop_gained | c.1552A > T | p.Lys518* |
| 2:25245255:T:TG | NA | frameshift | c.1551dupC | p.Lys518fs |
| 2:25245255:T:TG | NA | frameshift | c.1550_1551dupGC | p.Lys518fs |
| C | | | | |
| 2:25245255:TG:T | NA | frameshift | c.1551delC | p.Cys517fs |
| 2:25245256:G:T | NA | stop_gained | c.1551C > A | p.Cys517* |
| 2:25245256:GC:G | NA | frameshift | c.1550delG | p.Cys517fs |
| 2:25245258:AG:A | NA | frameshift | c.1548delC | p.Cys517fs |
| 2:25245259:GT:G | rs746528594 | frameshift | c.1547delA | p.Asn516fs |
| 2:25245261:TTTG | NA | frameshift | c.1538_1545delTG | p.Met513fs |
| GCACA:T | | | TGCCAA | |
| 2:25245263:T:TG | NA | frameshift | c.1519_1543dupCC | p.Gln515fs |
| GCACATTCCTCCA | | | CCTCTTCGTTGGAG | |
| ACGAAGAGGGG | | | GAATGTGCC | |
| 2:25245263:TG:T | NA | frameshift | c.1543delC | p.Gln515fs |
| 2:25245263:TGGC | NA | frameshift | c.1531_1543delGG | p.Gly511fs |
| ACATTCCTCC:T | | | AGGAATGTGCC | |
| 2:25245263:TGGC | NA | stop_gained | c.1526_1543delTC | p.Phe509_Gln515 |
| ACATTCCTCCAAC | | | GTTGGAGGAATGT | delinsTer |
| GA:T | | | GCC | |
| 2:25245264:G:A | rs1449820788 | stop_gained | c.1543C > T | p.Gln515* |
| 2:25245265:G:T | NA | stop_gained | c.1542C > A | p.Cys514* |
| 2:25245266:CA:C | | frameshift | c.1540delT | p.Cys514fs |
| 2:25245267:AC:A | NA | frameshift | c.1539delG | p.Met513fs |
| 2:25245269:A:AT | rs780842310 | frameshift | c.1537dupA | p.Met513fs |
| 2:25245269:AT:A | NA | frameshift | c.1537delA | p.Met513fs |
| 2:25245269:ATTC | NA | frameshift | c.1524_1537delCTT | p.Phe509fs |
| CTCCAACGAAG:A | | | CGTTGGAGGAA | |
| 2:25245270:TTC:T | NA | frameshift | c.1535_1536delGA | p.Gly512fs |
| 2:25245271:T:TCC | NA | frameshift | c.1532_1535dupG | p.Met513fs |
| TC | | | AGG | |
| 2:25245272:C:CC | NA | frameshift | c.1498_1534dupCT | p.Gly512fs |
| TCCAACGAAGAG | | | CAATGTTACCCTGG | |
| GGGGTGTTCCAG | | | AACACCCCCTCTTC | |
| GGTAACATTGAG | | | GTTGGAG | |
| 2:25245274:TC:T | NA | frameshift | c.1532delG | p.Gly511fs |
| 2:25245276:C:A | NA | stop_gained | c.1531G > T | p.Gly511* |
| 2:25245276:C:CA | NA | frameshift | c.1530dupT | p.Gly511fs |
| 2:25245276:CA:C | NA | frameshift | c.1530delT | p.Gly511fs |
| 2:25245276:CAAC | NA | frameshift | c.1527_1530delCG | p.Phe509fs |
| G:C | | | TT | |
| 2:25245278:AC:A | NA | frameshift | c.1528delG | p.Va1510fs |
| 2:25245278:ACG: | NA | frameshift | c.1527_1528delCG | p.Va1510fs |
| A | | | | |
| 2:25245279:CG:C | NA | frameshift | c.1527delC | p.Phe509fs |
| 2:25245281:AAG: | NA | frameshift | c.1524_1525delCT | p.Phe509fs |
| A | | | | |
| 2:25245283:GA:G | NA | frameshift | c.1523delT | p.Leu508fs |
| 2:25245284:A:AG | NA | frameshift | c.1522dupC | p.Leu508fs |
| 2:25245284:A:G | rs1056677010 | missense | c.1523T > C | p.Leu508Pro |
| 2:25245284:AG:A | rs1162765172 | frameshift | c.1522delC | p.Leu508fs |
| 2:25245288:G:GG | NA | frameshift | c.1514_1518dupAA | p.Pro507fs |
| TGTT | | | CAC | |
| 2:25245289:GT:G | NA | frameshift | c.1517delA | p.His506fs |
| 2:25245290:T:TC | NA | frameshift | c.1516_1517insG | p.His506fs |
| 2:25245290:T:TCC | NA | frameshift | c.1516_1517insGG | p.His506fs |
| 2:25245290:TGTT | NA | frameshift | c.1512_1516delGG | p.Glu505fs |
| CC:T | | | AAC | |
| 2:25245290:TGTT | NA | frameshift | c.1510_1516delCT | p.Leu504fs |
| CCAG:T | | | GGAAC | |
| 2:25245291:GT:G | NA | frameshift | c.1515delA | p.Glu505fs |
| 2:25245293:T:TCC | NA | frameshift | c.1492_1513dupG | p.Glu505fs |
| AGGGTAACATTGA | | | GGAGCCTCAATGTT | |
| GGCTCCC | | | ACCCTGG | |
| 2:25245293:TC:T | NA | frameshift | c.1513delG | p.Glu505fs |
| 2:25245293:TCCA | NA | frameshift | c.1489_1513delTG | p.Cys497fs |
| GGGTAACATTGA | | | TGGGAGCCTCAATG | |
| GGCTCCCACA:T | | | TTACCCTGG | |
| 2:25245294:C:A | rs373860660 | stop_gained | c.1513G > T | p.Glu505* |
| 2:25245294:C:CC | NA | frameshift | c.1487_1512dupCC | p.Glu505fs |
| AGGGTAACATTGA | | | TGTGGGAGCCTCAA | |
| GGCTCCCACAGG | | | TGTTACCCTG | |
| 2:25245295:CA:C | NA | frameshift | c.1511delT | p.Leu504fs |
| 2:25245295:CAG | NA | frameshift | c.1508_1511delCC | p.Thr503fs |
| GG:C | | | CT | |
| 2:25245296:AG:A | NA | frameshift | c.1510delC | p.Leu504fs |
| 2:25245298:G:GG | NA | frameshift | c.1507_1508dupAC | p.Leu504fs |
| T | | | | |
| 2:25245298:G:GG | NA | frameshift | c.1505_1508dupTT | p.Leu504fs |
| TAA | | | AC | |
| 2:25245298:GGT: | NA | frameshift | c.1507_1508delAC | p.Thr503fs |
| G | | | | |
| 2:25245299:G:GT | NA | frameshift | c.1507dupA | p.Thr503fs |
| 2:25245299:GT:G | NA | frameshift | c.1507delA | p.Thr503fs |
| 2:25245300:T:TA | NA | frameshift | c.1506dupT | p.Thr503fs |
| 2:25245300:TA:T | NA | frameshift | c.1506delT | p.Thr503fs |
| 2:25245300:TAA: | NA | frameshift | c.1505_1506delTT | p.Va1502fs |
| T | | | | |
| 2:25245302:AC:A | NA | frameshift | c.1504delG | p.Va1502fs |
| 2:25245303:C:CA | NA | frameshift | c.1503dupT | p.Va1502fs |
| 2:25245303:CA:C | NA | frameshift | c.1503delT | p.Asn501fs |
| 2:25245303:CAT: | NA | frameshift | c.1502_1503delAT | p.Asn501fs |
| C | | | | |
| 2:25245304:A:AT | NA | frameshift | c.1501_1502dupAA | p.Asn501fs |
| T | | | | |
| 2:25245304:AT:A | NA | frameshift | c.1502delA | p.Asn501fs |
| 2:25245304:ATT: | NA | frameshift | c.1501_1502delAA | p.Asn501fs |
| A | | | | |
| 2:25245304:ATTG | NA | frameshift | c.1498_1502delCT | p.Leu500fs |
| AG:A | | | CAA | |
| 2:25245306:TGA: | NA | frameshift | c.1499_1500delTC | p.Leu500fs |
| T | | | | |
| 2:25245308:AG:A | NA | frameshift | c.1498delC | p.Leu500fs |
| 2:25245309:G:GG | NA | frameshift | c.1494_1497dupG | p.Leu500fs |
| CTC | | | AGC | |
| 2:25245311:CT:C | NA | frameshift | c.1495delA | p.Ser499fs |
| 2:25245312:TC:T | NA | frameshift | c.1494delG | p.Ser499fs |
| 2:25245314:C:CC | NA | frameshift | c.1491_1492dupTG | p.Gly498fs |
| A | | | | |
| 2:25245315:C:CA | NA | frameshift | c.1491dupT | p.Gly498fs |
| 2:25245316:A:C | NA | missense | c.1491T > G | p.Cys497Trp |
| 2:25245316:AC:A | NA | frameshift | c.1490delG | p.Cys497fs |
| 2:25245317:C:A | rs779323387 | missense | c.1490G > T | p.Cys497Phe |
| 2:25245317:C:G | NA | missense | c.1490G > C | p.Cys497Ser |
| 2:25245317:C:T | rs779323387 | missense | c.1490G > A | p.Cys497Tyr |
| 2:25245317:CA:C | NA | frameshift | c.1489delT | p.Cys497fs |
| 2:25245317:CAG | NA | splice_acceptor | c.1475- | p.Asp492_Cys497 |
| GAGATGCAGATG | | | 6_1489delTTCCAG | delinsGly |
| TCTGGAA:C | | | ACATCTGCATCTCCT | |
| 2:25245318:A:G | NA | missense | c.1489T > C | p.Cys497Arg |
| 2:25245318:A:T | NA | missense | c.1489T > A | p.Cys497Ser |
| 2:25245318:AG:A | NA | frameshift | c.1488delC | p.Cys497fs |
| 2:25245320:GA:G | NA | frameshift | c.1486delT | p.Ser496fs |
| 2:25245321:AG:A | NA | frameshift | c.1485delC | p.Ser496fs |
| 2:25245325:G:C | rs1224606813 | missense | c.1482C > G | p.Cys494Trp |
| 2:25245325:G:T | NA | stop_gained | c.1482C > A | p.Cys494* |
| 2:25245326:C:A | NA | missense | c.1481G > T | p.Cys494Phe |
| 2:25245326:C:G | rs1240736156 | missense | c.1481G > C | p.Cys494Ser |
| 2:25245326:C:T | NA | missense | c.1481G > A | p.Cys494Tyr |
| 2:25245327:A:C | NA | missense | c.1480T > G | p.Cys494Gly |
| 2:25245327:A:G | NA | missense | c.1480T > C | p.Cys494Arg |
| 2:25245327:A:T | NA | missense | c.1480T > A | p.Cys494Ser |
| 2:25245327:AG:A | NA | frameshift | c.1479delC | p.Cys494fs |
| 2:25245328:GA:G | NA | frameshift | c.1478delT | p.Ile493fs |
| 2:25245329:AT:A | NA | frameshift | c.1477delA | p.Ile493fs |
| 2:25245330:TG:T | NA | frameshift | c.1476delC | p.Asp492fs |
| 2:25245330:TGTC | NA | frameshift | c.1475- | p.Ile493fs |
| TGGAAAGCA:T | | | 10_1476delTGCTTT | |
| | | | CCAGAC | |
| 2:25245331:GT:G | NA | frameshift | c.1475delA | p.Asp492fs |
| 2:25245333:C:G | rs746402248 | splice_acceptor | c.1475-1G > C | |
| 2:25245333:C:T | NA | splice_acceptor | c.1475-1G > A | |
| 2:25245333:CT:C | NA | splice_acceptor | c.1475-2delA | |
| 2:25245333:CTGG | NA | splice_acceptor | c.1475-21_1475- | |
| AAAGCAGAGGGA | | | 2delTCCCCTCCCTCT | |
| GGGGA:C | | | GCTTTCCA | |
| 2:25246010:ACAA | NA | splice_donor | c.1472_1474+9del | p.Glu491del |
| ACTTACCCT:A | | | AGGGTAAGTTTG | |
| 2:25246015:CTTA | NA | frameshift | c.1467_1474+4del | p.Asn489fs |
| CCCTCAATG:C | | | CATTGAGGGTAA | |
| 2:25246018:A:AC | NA | splice_donor | c.1474+ldupG | |
| 2:25246018:A:C | NA | splice_donor | c.1474+2T > G | |
| 2:25246018:AC:A | rs1200077617 | splice_donor | c.1474+ldelG | |
| 2:25246018:ACCC | NA | splice_donor | c.1472_1474+ldel | p.Glu491del |
| T:A | | | AGGG | |
| 2:25246019:C:A | NA | splice_donor | c.1474+1G > T | |
| 2:25246019:C:G | NA | splice_donor | c.1474+1G > C | |
| 2:25246019:C:T | rs761608224 | splice_donor | c.1474+1G > A | |
| 2:25246022:T:TC | NA | frameshift | c.1470_1471dupTG | p.Glu491fs |
| A | | | | |
| 2:25246022:TC:T | NA | frameshift | c.1471delG | p.Glu491fs |
| 2:25246022:TCAA | NA | frameshift | c.1461_1471delCC | p.Cys487fs |
| TGTTCCGG:T | | | GGAACATTG | |
| 2:25246023:C:A | NA | stop_gained | c.1471G > T | p.Glu491* |
| 2:25246023:C:CA | NA | frameshift | c.1470dupT | p.Glu491fs |
| 2:25246023:CA:C | NA | frameshift | c.1470delT | p.Ile490fs |
| 2:25246024:A:AA | NA | frameshift | c.1469_1470insGC | p.Ile490fs |
| TGGTGCGGC | | | CGCACCAT | |
| 2:25246025:A:AT | NA | frameshift | c.1455_1468dupG | p.Ile490fs |
| GTTCCGGCACTTC | | | AAGTGCCGGAACA | |
| 2:25246026:TG:T | NA | frameshift | c.1467delC | p.Asn489fs |
| 2:25246027:GT:G | NA | frameshift | c.1466delA | p.Asn489fs |
| 2:25246028:TTCC | NA | frameshift | c.1455_1465delGA | p.Lys486fs |
| GGCACTTC:T | | | AGTGCCGGA | |
| 2:25246029:T:TC | NA | frameshift | c.1464dupG | p.Asn489fs |
| 2:25246029:TC:T | | frameshift | c.1464delG | p.Asn489fs |
| 2:25246030:CCG | NA | frameshift | c.1459_1463delTG | p.Cys487fs |
| GCA:C | | | CCG | |
| 2:25246031:C:CG | NA | frameshift | c.1462dupC | p.Arg488fs |
| 2:25246033:G:T | NA | stop_gained | c.1461C > A | p.Cys487* |
| 2:25246033:GC:G | NA | frameshift | c.1460delG | p.Cys487fs |
| 2:25246034:CA:C | NA | frameshift | c.1459delT | p.Cys487fs |
| 2:25246035:AC:A | NA | frameshift | c.1458delG | p.Lys486fs |
| 2:25246035:ACTT | NA | frameshift | c.1454_1458delAG | p.Gln485fs |
| CT:A | | | AAG | |
| 2:25246036:CT:C | NA | frameshift | c.1457delA | p.Lys486fs |
| 2:25246037:TTC:T | NA | frameshift | c.1455_1456delGA | p.Lys486fs |
| 2:25246038:T:A | NA | stop_gained | c.1456A > T | p.Lys486* |
| 2:25246038:TC:T | NA | frameshift | c.1455delG | p.Lys486fs |
| 2:25246040:TGCC | NA | frameshift | c.1443_1453delCG | p.Tyr481fs |
| GCACCTCG:T | | | AGGTGCGGC | |
| 2:25246041:G:A | NA | stop_gained | c.1453C > T | p.Gln485* |
| 2:25246041:GC:G | NA | frameshift | c.1452delG | p.Gln485fs |
| 2:25246042:C:CC | rs1131691760 | frameshift | c.1450_1451dupCG | p.Gln485fs |
| G | | | | |
| 2:25246042:CCG: | NA | frameshift | c.1450_1451delCG | p.Arg484fs |
| C | | | | |
| 2:25246044:G:GC | NA | frameshift | c.1449dupG | p.Arg484fs |
| 2:25246044:G:GC | NA | frameshift | c.1448_1449dupTG | p.Arg484fs |
| A | | | | |
| 2:25246045:CACC | NA | frameshift | c.1442_1448delAC | p.Tyr481fs |
| TCGT:C | | | GAG GT | |
| 2:25246046:AC:A | NA | frameshift | c.1447delG | p.Va1483fs |
| 2:25246046:ACC: | NA | frameshift | c.1446_1447delGG | p.Glu482fs |
| A | | | | |
| 2:25246047:CCTC | NA | frameshift | c.1430_1446delAG | p.Glu477fs |
| GTACACCAGCCGC | | | CGGCTGGTGTACGA | |
| T:C | | | G | |
| 2:25246050:C:A | rs769071767 | stop_gained | c.1444G > T | p.Glu482* |
| 2:25246050:CG:C | NA | frameshift | c.1443delC | p.Tyr481fs |
| 2:25246051:G:C | rs145465364 | stop_gained | c.1443C > G | p.Tyr481* |
| 2:25246051:G:T | NA | stop_gained | c.1443C > A | p.Tyr481* |
| 2:25246052:T:TA | rs1273047372 | frameshift | c.1441dupT | p.Tyr481fs |
| 2:25246052:TAC: | NA | frameshift | c.1440_1441delGT | p.Tyr481fs |
| T | | | | |
| 2:25246054:CACC | NA | frameshift | c.1436_1439delTG | p.Leu479fs |
| A:C | | | GT | |
| 2:25246055:A:AC | NA | frameshift | c.1438dupG | p.Va1480fs |
| 2:25246057:CA:C | NA | frameshift | c.1436delT | p.Leu479fs |
| 2:25246058:AG:A | NA | frameshift | c.1435delC | p.Leu479fs |
| 2:25246058:AGCC | NA | frameshift | c.1432_1435delCG | p.Arg478fs |
| G:A | | | GC | |
| 2:25246058:AGCC | NA | splice_acceptor | c.1430- | p.Glu477_Leu479 |
| GCTCTGCAAG:A | | | 7_1435delCTTGCA | delinsVal |
| | | | GAGCGGC | |
| 2:25246059:GC:G | NA | frameshift | c.1434delG | p.Leu479fs |
| 2:25246061:CG:C | NA | frameshift | c.1432delC | p.Arg478fs |
| 2:25246061:CGCT | NA | splice_acceptor | c.1430- | p.Glu477_Arg478 |
| CTGCAAGGGGAG | | | 19_1432delAGCTC | delinsGly |
| GAGAGCT:C | | | TCCTCCCCTTGCAG | |
| | | | AGC | |
| 2:25246062:G:GC | NA | frameshift | c.1430_1431dupA | p.Arg478fs |
| T | | | G | |
| 2:25246062:G:GC | NA | frameshift | c.1430- | p.Leu479fs |
| TCT | | | 2_1431dupAGAG | |
| 2:25246062:GC:G | NA | frameshift | c.1431delG | p.Glu477fs |
| 2:25246062:GCTC: | NA | frameshift | c.1430- | p.Glu477fs |
| G | | | 1_1431delGAG | |
| 2:25246064:T:TC | NA | splice_acceptor | c.1430-1dupG | |
| 2:25246065:C:A | rs1363411956 | splice_acceptor | c.1430-1G > T | |
| 2:25246065:C:G | NA | splice_acceptor | c.1430-1G > C | |
| 2:25246065:C:T | NA | splice_acceptor | c.1430-1G > A | |
| 2:25246066:T:A | NA | splice_acceptor | c.1430-2A > T | |
| 2:25246066:T:C | rs1307856488 | splice_acceptor | c.1430-2A > G | |
| 2:25246066:T:G | NA | splice_acceptor | c.1430-2A > C | |
| 2:25246155:ACTA | NA | splice_donor | c.1424_1429+4del | p.Thr475_Glu477 |
| CTCTTTG:A | | | CAAGAGGTAG | delinsLys |
| 2:25246157:TA:T | NA | splice_donor | c.1429+2delT | |
| 2:25246158:A:C | NA | splice_donor | c.1429+2T > G | |
| 2:25246158:A:G | rs1207237998 | splice_donor | c.1429+2T > C | |
| 2:25246158:A:T | NA | splice_donor | c.1429+2T > A | |
| 2:25246158:AC:A | rs772195614 | splice_donor | c.1429+1delG | |
| 2:25246159:C:A | NA | splice_donor | c.1429+1G > T | |
| 2:25246159:C:CC | NA | frameshift | c.1428_1429dupA | p.Arg478fs |
| T | | | G | |
| 2:25246159:C:G | NA | splice_donor | c.1429+1G > C | |
| 2:25246159:C:T | rs774112139 | splice_donor | c.1429+1G > A | |
| 2:25246159:CCT: | NA | frameshift | c.1428_1429delAG | p.Glu477fs |
| C | | | | |
| 2:25246159:CCTC | NA | frameshift | c.1423_1429delAC | p.Thr475fs |
| TTGT:C | | | AAGAG | |
| 2:25246159:CCTC | NA | frameshift | c.1422_1429delCA | p.Thr475fs |
| TTGTG:C | | | CAAGAG | |
| 2:25246160:C:A | NA | stop_gained | c.1429G > T | p.Glu477* |
| 2:25246160:CT:C | NA | frameshift | c.1428delA | p.Glu477fs |
| 2:25246162:C:CT | NA | frameshift | c.1426dupA | p.Arg476fs |
| 2:25246162:CT:C | NA | frameshift | c.1426delA | p.Arg476fs |
| 2:25246163:T:A | rs772041976 | stop_gained | c.1426A > T | p.Arg476* |
| 2:25246163:TTG: | NA | frameshift | c.1424_1425delCA | p.Thr475fs |
| T | | | | |
| 2:25246164:TG:T | NA | frameshift | c.1424delC | p.Thr475fs |
| 2:25246165:G:GT | NA | frameshift | c.1419_1423dupGC | p.Thr475fs |
| GCGC | | | GCA | |
| 2:25246165:G:GT | NA | frameshift | c.1423_1424insAA | p.Thr475fs |
| GCGCTT | | | GCGCA | |
| 2:25246166:TGC: | NA | frameshift | c.1421_1422delGC | p.Arg474fs |
| T | | | | |
| 2:25246167:GC:G | NA | frameshift | c.1421delG | p.Arg474fs |
| 2:25246167:GCG | NA | frameshift | c.1418_1421delAG | p.Glu473fs |
| CT:G | | | CG | |
| 2:25246168:C:CT | NA | frameshift | c.1420_1421insA | p.Arg474fs |
| 2:25246168:CG:C | NA | frameshift | c.1420delC | p.Arg474fs |
| 2:25246169:G:GC | NA | frameshift | c.1416_1419dupTG | p.Arg474fs |
| TCA | | | AG | |
| 2:25246170:CT:C | NA | frameshift | c.1418delA | p.Glu473fs |
| 2:25246171:TC:T | NA | frameshift | c.1417delG | p.Glu473fs |
| 2:25246172:C:A | NA | stop_gained | c.1417G > T | p.Glu473* |
| 2:25246172:C:CA | NA | frameshift | c.1416dupT | p.Glu473fs |
| 2:25246172:CA:C | NA | frameshift | c.1416delT | p.Asp472fs |
| 2:25246172:CATC | NA | frameshift | c.1413_1416delTG | p.Ile471fs |
| A:C | | | AT | |
| 2:25246172:CATC | NA | frameshift | c.1409_1416delTT | p.Ile470fs |
| AATAA:C | | | ATTGAT | |
| 2:25246174:T:TA | NA | frameshift | c.1414_1415insT | p.Asp472fs |
| 2:25246174:TC:T | rs1347154070 | frameshift | c.1414delG | p.Asp472fs |
| 2:25246175:CA:C | NA | frameshift | c.1413delT | p.Ile471fs |
| 2:25246178:T:TA | NA | frameshift | c.1410dupT | p.Ile471fs |
| 2:25246178:T:TA | NA | frameshift | c.1409_1410dupTT | p.Ile471fs |
| A | | | | |
| 2:25246178:T:TA | NA | frameshift | c.1407_1410dupG | p.Ile471fs |
| ATC | | | ATT | |
| 2:25246178:T:TA | NA | frameshift | c.1401_1410dupCA | p.Ile471fs |
| ATCTCCTTG | | | AGGAGATT | |
| 2:25246178:TA:T | NA | frameshift | c.1410delT | p.Ile471fs |
| 2:25246179:A:AT | NA | frameshift | c.1409_1410insA | p.Ile471fs |
| 2:25246179:AAT: | NA | frameshift | c.1408_1409delAT | p.Ile470fs |
| A | | | | |
| 2:25246180:A:AT | NA | frameshift | c.1407_1408dupG | p.Ile470fs |
| C | | | A | |
| 2:25246180:AT:A | rs1348892100 | frameshift | c.1408delA | p.Ile470fs |
| 2:25246180:ATC: | NA | frameshift | c.1407_1408delGA | p.Glu469fs |
| A | | | | |
| 2:25246180:ATCT | NA | frameshift | c.1392_1408delGC | p.Lys464fs |
| CCTTGACCTTGGG | | | CCAAGGTCAAGGA | |
| C:A | | | GA | |
| 2:25246182:CT:C | NA | frameshift | c.1406delA | p.Glu469fs |
| 2:25246182:CTCC | NA | frameshift | c.1397_1406delAG | p.Lys466fs |
| TTGACCT:C | | | GTCAAGGA | |
| 2:25246183:TC:T | NA | frameshift | c.1405delG | p.Glu469fs |
| 2:25246184:C:A | rs765389013 | stop_gained | c.1405G > T | p.Glu469* |
| 2:25246185:C:CT | NA | frameshift | c.1403dupA | p.Glu469fs |
| 2:25246185:CT:C | NA | frameshift | c.1403delA | p.Lys468fs |
| 2:25246187:TG:T | NA | frameshift | c.1401delC | p.Lys468fs |
| 2:25246189:AC:A | rs1360596024 | frameshift | c.1399delG | p.Va1467fs |
| 2:25246189:ACC: | NA | frameshift | c.1398_1399delGG | p.Lys466fs |
| A | | | | |
| 2:25246191:CT:C | rs775785710 | frameshift | c.1397delA | p.Lys466fs |
| 2:25246191:CTTG | NA | frameshift | c.1391_1397delAG | p.Lys464fs |
| GGCT:C | | | CCCAA | |
| 2:25246192:T:TT | NA | frameshift | c.1384_1396dupGC | p.Lys466fs |
| GGGCTTCTCCGC | | | GGAGAAGCCCA | |
| 2:25246193:T:A | NA | stop_gained | c.1396A > T | p.Lys466* |
| 2:25246193:T:TG | NA | frameshift | c.1395dupC | p.Lys466fs |
| 2:25246193:TG:T | NA | frameshift | c.1395delC | p.Lys466fs |
| 2:25246196:GCTT | NA | frameshift | c.1388_1392delAG | p.Glu463fs |
| CT:G | | | AAG | |
| 2:25246197:C:CG | NA | frameshift | c.1391_1392insTTC | p.Lys464fs |
| AGAA | | | TC | |
| 2:25246198:T:TTC | NA | frameshift | c.1389_1390dupG | p.Lys464fs |
| | | | A | |
| 2:25246198:TTC:T | rs1349621546 | frameshift | c.1389_1390delGA | p.Lys464fs |
| 2:25246199:T:A | NA | stop_gained | c.1390A > T | p.Lys464* |
| 2:25246201:T:TC | NA | frameshift | c.1387dupG | p.Glu463fs |
| 2:25246201:TC:T | NA | frameshift | c.1387delG | p.Glu463fs |
| 2:25246201:TCCG | NA | frameshift | c.1380_1387delCA | p.Ser460fs |
| CTGTG:T | | | CAGCGG | |
| 2:25246202:C:A | NA | stop_gained | c.1387G > T | p.Glu463* |
| 2:25246202:C:CA | NA | frameshift | c.1386_1387insT | p.Glu463fs |
| 2:25246203:CG:C | NA | frameshift | c.1385delC | p.Ala462fs |
| 2:25246205:C:CT | NA | frameshift | c.1364_1383dupAA | p.Ala462fs |
| GTGCTCTTCCGGG | | | AAGCCCCGGAAGA | |
| GCTTTT | | | GCACA | |
| 2:25246205:CT:C | NA | frameshift | c.1383delA | p.Ala462fs |
| 2:25246207:G:GC | NA | frameshift | c.1381_1382insG | p.Thr461fs |
| 2:25246208:TG:T | NA | frameshift | c.1380delC | p.Ser460fs |
| 2:25246209:GCT: | NA | frameshift | c.1378_1379delAG | p.Ser460fs |
| G | | | | |
| 2:25246209:GCTC | NA | frameshift | c.1375_1379delAA | p.Lys459fs |
| TT:G | | | GAG | |
| 2:25246211:T:TCT | NA | frameshift | c.1361_1377dupCC | p.Ser460fs |
| TCCGGGGCTTTTT | | | AAAAAGCCCCGGA | |
| GG | | | AG | |
| 2:25246212:CT:C | NA | frameshift | c.1376delA | p.Lys459fs |
| 2:25246213:TTCC | NA | frameshift | c.1368_1375delGC | p.Pro457fs |
| GGGGC:T | | | CCCGGA | |
| 2:25246214:T:A | rs768204905 | stop_gained | c.1375A > T | p.Lys459* |
| 2:25246214:T:TC | NA | frameshift | c.1374dupG | p.Lys459fs |
| 2:25246214:TC:T | rs886041641 | frameshift | c.1374delG | p.Lys459fs |
| 2:25246214:TCC:T | NA | frameshift | c.1373_1374delGG | p.Arg458fs |
| 2:25246216:C:CG | NA | frameshift | c.1372dupC | p.Arg458fs |
| 2:25246216:CG:C | NA | frameshift | c.1372delC | p.Arg458fs |
| 2:25246219:GGCT | NA | frameshift | c.1359_1369delAG | p.Ala454fs |
| TTTTGGCT:G | | | CCAAAAAGC | |
| 2:25246220:GC:G | NA | frameshift | c.1368delG | p.Lys456fs |
| 2:25246221:C:CT | NA | frameshift | c.1367dupA | p.Pro457fs |
| 2:25246226:T:A | NA | stop_gained | c.1363A > T | p.Lys455* |
| 2:25246226:TG:T | rs765073748 | frameshift | c.1362delC | p.Lys456fs |
| 2:25246228:G:GC | NA | frameshift | c.1360dupG | p.Ala454fs |
| 2:25246228:GC:G | NA | frameshift | c.1360delG | p.Ala454fs |
| 2:25246230:T:TG | NA | frameshift | c.1357_1358dupCC | p.Ala454fs |
| G | | | | |
| 2:25246232:G:GT | NA | frameshift | c.1356dupA | p.Pro453fs |
| 2:25246233:T:TG | NA | frameshift | c.1355dupC | p.Pro453fs |
| 2:25246235:GA:G | NA | frameshift | c.1353delT | p.Pro452fs |
| 2:25246235:GAG | NA | frameshift | c.1343_1353delAC | p.Tyr448fs |
| GTGGTGCGT:G | | | GCACCACCT | |
| 2:25246236:AG:A | NA | frameshift | c.1352delC | p.Pro451fs |
| 2:25246236:AGG | NA | frameshift | c.1340_1352delCC | p.Ala447fs |
| TGGTGCGTAGG:A | | | TACGCACCACC | |
| 2:25246236:AGG | NA | frameshift | c.1328_1352delCT | p.Pro443fs |
| TGGTGCGTAGGC | | | GAGGCAGCTGCCTA | |
| AGCTGCCTCAG:A | | | CGCACCACC | |
| 2:25246238:G:GT | NA | frameshift | c.1350dupA | p.Pro451fs |
| 2:25246238:GT:G | NA | frameshift | c.1350delA | p.Pro451fs |
| 2:25246239:TG:T | rs1287033864 | frameshift | c.1349delC | p.Pro450fs |
| 2:25246241:GT:G | NA | frameshift | c.1347delA | p.Pro450fs |
| 2:25246242:T:TG | NA | frameshift | c.1346dupC | p.Pro450fs |
| 2:25246242:TGC: | NA | frameshift | c.1345_1346delGC | p.Ala449fs |
| T | | | | |
| 2:25246244:CGTA | NA | frameshift | c.1338_1344delTG | p.Ala447fs |
| GGCA:C | | | CCTAC | |
| 2:25246245:G:C | NA | stop_gained | c.1344C > G | p.Tyr448* |
| 2:25246245:G:GT | NA | frameshift | c.1343_1344insAA | p.Tyr448fs |
| T | | | | |
| 2:25246245:G:T | rs137931376 | stop_gained | c.1344C > A | p.Tyr448* |
| 2:25246246:TA:T | NA | frameshift | c.1342delT | p.Tyr448fs |
| 2:25246246:TAG | NA | frameshift | c.1330_1342delGA | p.Glu444fs |
| GCAGCTGCCTC:T | | | GGCAGCTGCCT | |
| 2:25246247:AG:A | NA | frameshift | c.1341delC | p.Tyr448fs |
| 2:25246247:AGG | NA | frameshift | c.1335_1341delAG | p.Ala446fs |
| CAGCT:A | | | CTGCC | |
| 2:25246249:GC:G | NA | frameshift | c.1339delG | p.Ala447fs |
| 2:25246249:GCA | NA | frameshift | c.1326_1339delAC | p.Glu442fs |
| GCTGCCTCAGGT: | | | CTGAGGCAGCTG | |
| G | | | | |
| 2:25246250:C:CA | NA | frameshift | c.1335_1338dupA | p.Ala447fs |
| GCT | | | GCT | |
| 2:25246252:GCTG | NA | frameshift | c.1333_1336delGC | p.Ala445fs |
| C:G | | | AG | |
| 2:25246252:GCTG | NA | frameshift | c.1320_1336delGG | p.Trp440fs |
| CCTCAGGTTCCAC | | | TGGAACCTGAGGC | |
| C:G | | | AG | |
| 2:25246253:CTGC | NA | frameshift | c.1316_1335delTG | p.Met439fs |
| CTCAGGTTCCACC | | | TGGGTGGAACCTG | |
| CACA:C | | | AGGCA | |
| 2:25246254:TG:T | NA | frameshift | c.1334delC | p.Ala445fs |
| 2:25246259:C:A | rs1481248882 | stop_gained | c.1330G > T | p.Glu444* |
| 2:25246259:CA:C | NA | frameshift | c.1329delT | p.Glu444fs |
| 2:25246259:CAG: | NA | frameshift | c.1328_1329delCT | p.Pro443fs |
| C | | | | |
| 2:25246260:A:AG | NA | frameshift | c.1328dupC | p.Glu444fs |
| 2:25246260:AG:A | NA | frameshift | c.1328delC | p.Pro443fs |
| 2:25246262:GT:G | NA | frameshift | c.1326delA | p.Glu442fs |
| 2:25246265:C:A | rs1205125035 | stop_gained | c.1324G > T | p.Glu442* |
| 2:25246266:CA:C | NA | frameshift | c.1322delT | p.Va1441fs |
| 2:25246267:A:AC | NA | frameshift | c.1321dupG | p.Va1441fs |
| 2:25246267:AC:A | rs1440952501 | frameshift | c.1321delG | p.Va1441fs |
| 2:25246269:C:CC | NA | frameshift | c.1318_1319dupTG | p.Trp440fs |
| A | | | | |
| 2:25246269:C:T | rs866490834 | stop_gained | c.1320G > A | p.Trp440* |
| 2:25246270:C:T | rs773260349 | stop_gained | c.1319G > A | p.Trp440* |
| 2:25246270:CA:C | NA | frameshift | c.1318delT | p.Trp440fs |
| 2:25246271:A:AC | NA | frameshift | c.1317dupG | p.Trp440fs |
| 2:25246271:AC:A | NA | frameshift | c.1317delG | p.Met439fs |
| 2:25246272:CAT: | rs762868483 | frameshift | c.1315_1316delAT | p.Met439fs |
| C | | | | |
| 2:25246272:CATG | NA | frameshift | c.1307_1316delAC | p.Tyr436fs |
| TCCGTGT:C | | | ACGGACAT | |
| 2:25246273:A:AA | NA | frameshift | c.1315_1316insAT | p.Met439fs |
| T | | | | |
| 2:25246273:A:AT | NA | frameshift | c.1314_1315dupCA | p.Met439fs |
| G | | | | |
| 2:25246273:AT:A | NA | frameshift | c.1315delA | p.Met439fs |
| 2:25246274:T:TG | NA | frameshift | c.1311_1314dupG | p.Met439fs |
| TCC | | | GAC | |
| 2:25246274:TGTC | NA | frameshift | c.1311_1314delGG | p.Asp438fs |
| C:T | | | AC | |
| 2:25246275:G:GT | NA | frameshift | c.1294_1313dupTA | p.Met439fs |
| CCGTGTACACTTC | | | CAAAGAAGTGTACA | |
| TTTGTA | | | CGGA | |
| 2:25246276:T:TC | NA | frameshift | c.1312dupG | p.Asp438fs |
| 2:25246276:TC:T | | frameshift | c.1312delG | p.Asp438fs |
| 2:25246276:TCCG | NA | frameshift | c.1294_1312delTA | p.Tyr432fs |
| TGTACACTTCTTT | | | CAAAGAAGTGTACA | |
| GTA:T | | | CGG | |
| 2:25246279:GT:G | NA | frameshift | c.1309delA | p.Thr437fs |
| 2:25246281:G:C | NA | stop_gained | c.1308C > G | p.Tyr436* |
| 2:25246281:G:T | NA | stop_gained | c.1308C > A | p.Tyr436* |
| 2:25246282:T:TA | NA | frameshift | c.1306dupT | p.Tyr436fs |
| 2:25246282:TA:T | NA | frameshift | c.1306delT | p.Tyr436fs |
| 2:25246282:TAC: | NA | frameshift | c.1305_1306delGT | p.Tyr436fs |
| T | | | | |
| 2:25246283:ACAC | NA | frameshift | c.1301_1305delAA | p.Glu434fs |
| TT:A | | | GTG | |
| 2:25246283:ACAC | NA | frameshift | c.1295_1305delAC | p.Tyr432fs |
| TTCTTTGT:A | | | AAAGAAGTG | |
| 2:25246284:CACT | NA | frameshift | c.1291_1304delCC | p.Pro431fs |
| TCTTTGTAGGG:C | | | CTACAAAGAAGT | |
| 2:25246285:A:AC | NA | frameshift | c.1303dupG | p.Va1435fs |
| 2:25246285:A:AC | NA | frameshift | c.1302_1303dupA | p.Va1435fs |
| T | | | G | |
| 2:25246286:CT:C | NA | frameshift | c.1302delA | p.Va1435fs |
| 2:25246287:T:TTC | NA | frameshift | c.1294_1301dupTA | p.Glu434fs |
| TTTGTA | | | CAAAGA | |
| 2:25246287:TTC:T | NA | frameshift | c.1300_1301delGA | p.Glu434fs |
| 2:25246288:TC:T | NA | frameshift | c.1300delG | p.Glu434fs |
| 2:25246289:C:A | NA | stop_gained | c.1300G > T | p.Glu434* |
| 2:25246289:CT:C | NA | frameshift | c.1299delA | p.Glu434fs |
| 2:25246291:T:TT | NA | frameshift | c.1296_1297dupCA | p.Lys433fs |
| G | | | | |
| 2:25246292:T:A | NA | stop_gained | c.1297A > T | p.Lys433* |
| 2:25246292:T:TG | NA | frameshift | c.1293_1296dupCT | p.Lys433fs |
| TAG | | | AC | |
| 2:25246292:TGTA | NA | frameshift | c.1293_1296delCT | p.Tyr432fs |
| G:T | | | AC | |
| 2:25246293:G:C | NA | stop_gained | c.1296C > G | p.Tyr432* |
| 2:25246293:G:GT | NA | stop_gained | c.1287_1295dupG | p.Pro431_Tyr432 |
| AGGGATTC | | | AATCCCTA | insTerAsnPro |
| 2:25246293:G:T | NA | stop_gained | c.1296C > A | p.Tyr432* |
| 2:25246294:TA:T | NA | frameshift | c.1294delT | p.Tyr432fs |
| 2:25246295:AG:A | NA | frameshift | c.1293delC | p.Tyr432fs |
| 2:25246295:AGG: | NA | frameshift | c.1292_1293delCC | p.Pro431fs |
| A | | | | |
| 2:25246297:G:GC | NA | frameshift | c.1291_1292insG | p.Pro431fs |
| 2:25246297:G:GG | NA | frameshift | c.1290_1291dupTC | p.Pro431fs |
| A | | | | |
| 2:25246298:G:GA | NA | frameshift | c.1290dupT | p.Pro431fs |
| 2:25246298:GA:G | NA | frameshift | c.1290delT | p.Tyr432fs |
| 2:25246300:T:TTC | NA | frameshift | c.1284_1288dupG | p.Asn430fs |
| TTC | | | AAGA | |
| 2:25246300:TTCT | NA | frameshift | c.1284_1288delGA | p.Lys429fs |
| TC:T | | | AGA | |
| 2:25246303:TTC:T | NA | frameshift | c.1284_1285delGA | p.Lys429fs |
| 2:25246304:T:A | NA | stop_gained | c.1285A > T | p.Lys429* |
| 2:25246304:TCTC | NA | frameshift | c.1280- | p.Lys429fs |
| TTCTGG:T | | | 4_1284delCCAGAA | |
| | | | GAG | |
| 2:25246305:CT:C | rs751049400 | frameshift | c.1283delA | p.Glu428fs |
| 2:25246306:TC:T | NA | frameshift | c.1282delG | p.Glu428fs |
| 2:25246307:C:A | NA | stop_gained | c.1282G > T | p.Glu428* |
| 2:25246307:C:CT | NA | frameshift | c.1281dupA | p.Glu428fs |
| 2:25246307:CT:C | NA | frameshift | c.1281delA | p.Glu428fs |
| 2:25246618:A:G | NA | splice_donor | c.1279+2T > C | |
| 2:25246619:C:A | NA | splice_donor | c.1279+1G > T | |
| 2:25246619:C:G | NA | splice_donor | c.1279+1G > C | |
| 2:25246619:C:T | rs374440649 | splice_donor | c.1279+1G > A | |
| 2:25246620:C:A | NA | stop_gained | c.1279G > T | p.Glu427* |
| 2:25246620:CT:C | NA | frameshift | c.1278delA | p.Glu427fs |
| 2:25246623:C:A | NA | stop_gained | c.1276G > T | p.Glu426* |
| 2:25246623:CT:C | NA | frameshift | c.1275delA | p.Glu426fs |
| 2:25246623:CTG: | NA | frameshift | c.1274_1275delCA | p.Pro425fs |
| C | | | | |
| 2:25246624:TG:T | NA | frameshift | c.1274delC | p.Pro425fs |
| 2:25246630:CT:C | NA | frameshift | c.1268delA | p.Glu423fs |
| 2:25246632:C:A | NA | stop_gained | c.1267G > T | p.Glu423* |
| 2:25246632:C:CC | NA | frameshift | c.1265_1266dupTG | p.Glu423fs |
| A | | | | |
| 2:25246632:C:CT | NA | frameshift | c.1266_1267insCCT | p.Glu423fs |
| AGG | | | A | |
| 2:25246633:CAG | NA | frameshift | c.1256_1265delCT | p.Pro419fs |
| GCCCTTAG:C | | | AAGGGCCT | |
| 2:25246634:AG:A | rs752298245 | frameshift | c.1264delC | p.Leu422fs |
| 2:25246636:GC:G | NA | frameshift | c.1262delG | p.Gly421fs |
| 2:25246636:GCCC | NA | frameshift | c.1259_1262delAG | p.Lys420fs |
| T:G | | | GG | |
| 2:25246637:CCCT | NA | frameshift | c.1219_1261delAT | p.Ile407fs |
| TAGGGCCAGAAG | | | TGAATGGGCCCTGG | |
| GCTGGAAGCCCCC | | | GGGGCTTCCAGCCT | |
| CAGGGCCCATTCA | | | TCTGGCCCTAAGG | |
| AT:C | | | | |
| 2:25246639:CT:C | NA | frameshift | c.1259delA | p.Lys420fs |
| 2:25246640:TTAG | NA | stop_gained | c.1250_1258delCT | p.Ser417_Lys420 |
| GGCCAG:T | | | GGCCCTA | delinsTer |
| 2:25246640:TTAG | NA | frameshift | c.1249_1258delTCT | p.Ser417fs |
| GGCCAGA:T | | | GGCCCTA | |
| 2:25246641:T:A | NA | stop_gained | c.1258A > T | p.Lys420* |
| 2:25246641:T:TA | NA | frameshift | c.1257dupT | p.Lys420fs |
| 2:25246641:TA:T | NA | frameshift | c.1257delT | p.Lys420fs |
| 2:25246642:A:AG | NA | frameshift | c.1256dupC | p.Lys420fs |
| 2:25246642:AG:A | NA | frameshift | c.1256delC | p.Pro419fs |
| 2:25246645:GC:G | NA | frameshift | c.1253delG | p.Gly418fs |
| 2:25246645:GCCA | NA | frameshift | c.1235_1253delGG | p.Gly412fs |
| GAAGGCTGGAAG | | | GGCTTCCAGCCTTC | |
| CCCC:G | | | TGG | |
| 2:25246647:C:CA | NA | frameshift | c.1251dupT | p.Gly418fs |
| 2:25246647:CAG: | NA | frameshift | c.1250_1251delCT | p.Ser417fs |
| C | | | | |
| 2:25246648:A:AG | NA | stop_gained | c.1250_1251insAG | p.Ser417_Gly418 |
| CCTTCTGGCCCTA | | | GCCCTTAGGGCCAG | insGlyProTerGly |
| AGGGCCT | | | AAGGC | GlnLysAla |
| 2:25246648:AG:A | NA | frameshift | c.1250delC | p.Ser417fs |
| 2:25246649:G:GT | NA | frameshift | c.1249_1250insA | p.Ser417fs |
| 2:25246649:GA:G | NA | frameshift | c.1249delT | p.Ser417fs |
| 2:25246651:AG:A | NA | frameshift | c.1247delC | p.Pro416fs |
| 2:25246653:GC:G | NA | frameshift | c.1245delG | p.Gln415fs |
| 2:25246653:GCTG | NA | frameshift | c.1223_1245delAA | p.Glu408fs |
| GAAGCCCCCCAG | | | TGGGCCCTGGGGG | |
| GGCCCATT:G | | | GCTTCCAG | |
| 2:25246654:C:CT | NA | frameshift | c.1244dupA | p.Pro416fs |
| 2:25246654:CTGG | NA | frameshift | c.1217_1244delTG | p.Met406fs |
| AAGCCCCCCAGG | | | ATTGAATGGGCCCT | |
| GCCCATTCAATCA: | | | GGGGGGCTTCCA | |
| C | | | | |
| 2:25246655:TG:T | NA | frameshift | c.1243delC | p.Gln415fs |
| 2:25246656:G:A | rs754223052 | stop_gained | c.1243C > T | p.Gln415* |
| 2:25246656:G:GG | NA | frameshift | c.1241_1242dupTC | p.Gln415fs |
| A | | | | |
| 2:25246657:G:C | NA | missense | c.1242C > G | p.Phe414Leu |
| 2:25246657:GA:G | NA | frameshift | c.1241delT | p.Phe414fs |
| 2:25246657:GAA | NA | frameshift | c.1222_1241delGA | p.Glu408fs |
| GCCCCCCAGGGCC | | | ATGGGCCCTGGGG | |
| CATTC:G | | | GGCTT | |
| 2:25246658:A:C | NA | missense | c.1241T > G | p.Phe414Cys |
| 2:25246658:A:G | rs1258189576 | missense | c.1241T > C | p.Phe414Ser |
| 2:25246658:AAG | NA | frameshift | c.1233_1240delGG | p.Gly412fs |
| CCCCCC:A | | | GGGGCT | |
| 2:25246658:AAG | NA | frameshift | c.1227_1240delGG | p.Trp409fs |
| CCCCCCAGGGCC: | | | CCCTGGGGGGCT | |
| A | | | | |
| 2:25246659:A:C | NA | missense | c.1240T > G | p.Phe414Val |
| 2:25246659:A:G | NA | missense | c.1240T > C | p.Phe414Leu |
| 2:25246659:A:T | rs1195155939 | missense | c.1240T > A | p.Phe414Ile |
| 2:25246659:AG:A | | frameshift | c.1239delC | p.Phe414fs |
| 2:25246659:AGC: | NA | frameshift | c.1238_1239delGC | p.Gly413fs |
| A | | | | |
| 2:25246660:G:GC | rs1234388246 | frameshift | c.1238dupG | p.Phe414fs |
| 2:25246660:G:GC | NA | frameshift | c.1234_1238dupG | p.Phe414fs |
| CCCC | | | GGGG | |
| 2:25246660:GCIG | rs755744291 | frameshift | c.1238delG | p.Gly413fs |
| 2:25246663:CCC | NA | frameshift | c.1232_1235dupTG | p.Phe414fs |
| CCA | | | GG | |
| 2:25246667:A:AG | NA | frameshift | c.1231dupC | p.Leu411fs |
| 2:25246667:A:AG | NA | frameshift | c.1209_1231dupCA | p.Leu411fs |
| GGCCCATTCAATC | | | AGCCCATGATTGAA | |
| ATGGGCTTG | | | TGGGCCC | |
| 2:25246667:AG:A | NA | frameshift | c.1231delC | p.Leu411fs |
| 2:25246670:GC:G | NA | frameshift | c.1228delG | p.Ala410fs |
| 2:25246672:C:T | | stop_gained | c.1227G > A | p.Trp409* |
| 2:25246672:CCAT | rs778152015 | frameshift | c.1223_1226delAA | p.Glu408fs |
| T:C | | | TG | |
| 2:25246673:C:CA | NA | frameshift | c.1225dupT | p.Trp409fs |
| 2:25246673:C:T | NA | stop_gained | c.1226G > A | p.Trp409* |
| 2:25246674:AT:A | NA | frameshift | c.1224delA | p.Glu408fs |
| 2:25246676:T:TC | NA | frameshift | c.1222dupG | p.Glu408fs |
| 2:25246677:C:A | NA | stop_gained | c.1222G > T | p.Glu408* |
| 2:25246677:C:CA | NA | frameshift | c.1221dupT | p.Glu408fs |
| 2:25246679:A:AT | NA | frameshift | c.1219_1220insGG | p.Ile407fs |
| GGGCCC | | | GCCCA | |
| 2:25246681:C:CA | NA | frameshift | c.1217_1218insTT | p.Met406fs |
| A | | | | |
| 2:25246681:CATG | NA | frameshift | c.1207_1217delAA | p.Asn403fs |
| GGCTTGTT:C | | | CAAGCCCAT | |
| 2:25246683:TG:T | NA | frameshift | c.1215delC | p.Met406fs |
| 2:25246686:GC:G | NA | frameshift | c.1212delG | p.Lys404fs |
| 2:25246687:C:CT | NA | frameshift | c.1211dupA | p.Pro405fs |
| 2:25246689:T:A | NA | stop_gained | c.1210A > T | p.Lys404* |
| 2:25246689:T:TG | | frameshift | c.1209dupC | p.Lys404fs |
| 2:25246689:TG:T | rs771398281 | frameshift | c.1209delC | p.Asn403fs |
| 2:25246690:GT:G | NA | frameshift | c.1208delA | p.Asn403fs |
| 2:25246691:T:TTC | NA | frameshift | c.1167_1207dupCA | p.Asn403fs |
| TGCACCTCCACGG | | | GCGATGAGAGTGA | |
| CCTTGGCAGTGTC | | | CACTGCCAAGGCCG | |
| ACTCTCATCGCTG | | | TGGAGGTGCAGA | |
| 2:25246691:TTCT | NA | frameshift | c.1188_1207delCA | p.Lys397fs |
| GCACCTCCACGGC | | | AGGCCGTGGAGGT | |
| CTTG:T | | | GCAGA | |
| 2:25246692:TC:T | NA | frameshift | c.1206delG | p.Asn403fs |
| 2:25246693:CT:C | NA | frameshift | c.1205delA | p.Gln402fs |
| 2:25246694:TGCA | NA | frameshift | c.1188_1204delCA | p.Lys397fs |
| CCTCCACGGCCTT | | | AGGCCGTGGAGGT | |
| G:T | | | GC | |
| 2:25246695:G:A | rs796065342 | stop_gained | c.1204C > T | p.Gln402* |
| 2:25246696:C:CA | NA | frameshift | c.1199_1202dupA | p.Gln402fs |
| CCT | | | GGT | |
| 2:25246699:CT:C | NA | frameshift | c.1199delA | p.Glu400fs |
| 2:25246699:CTCC | NA | frameshift | c.1189_1199delAA | p.Lys397fs |
| ACGGCCTT:C | | | GGCCGTGGA | |
| 2:25246700:T:TC | NA | frameshift | c.1198dupG | p.Glu400fs |
| 2:25246700:TC:T | NA | frameshift | c.1198delG | p.Glu400fs |
| 2:25246700:TCC:T | NA | frameshift | c.1197_1198delGG | p.Glu400fs |
| 2:25246701:C:A | rs751109858 | stop_gained | c.1198G > T | p.Glu400* |
| 2:25246701:C:CC | NA | frameshift | c.1196_1197dupTG | p.Glu400fs |
| A | | | | |
| 2:25246701:CCAC | NA | frameshift | c.1190_1197delAG | p.Lys397fs |
| GGCCT:C | | | GCCGTG | |
| 2:25246703:AC:A | NA | frameshift | c.1195delG | p.Va1399fs |
| 2:25246703:ACG | NA | frameshift | c.1188_1195delCA | p.Lys397fs |
| GCCTTG:A | | | AGGCCG | |
| 2:25246704:C:CG | NA | frameshift | c.1194_1195insCC | p.Va1399fs |
| TGG | | | AC | |
| 2:25246704:CG:C | NA | frameshift | c.1194delC | p.Va1399fs |
| 2:25246705:GGC | NA | frameshift | c.1171_1193delGA | p.Asp391fs |
| CTTGGCAGTGTCA | | | TGAGAGTGACACTG | |
| CTCTCATC:G | | | CCAAGGC | |
| 2:25246706:GC:G | NA | frameshift | c.1192delG | p.Ala398fs |
| 2:25246706:GCCT | NA | frameshift | c.1189_1192delAA | p.Lys397fs |
| T:G | | | GG | |
| 2:25246710:T:A | NA | stop_gained | c.1189A > T | p.Lys397* |
| 2:25246710:TG:T | NA | frameshift | c.1188delC | p.Lys397fs |
| 2:25246710:TGGC | NA | frameshift | c.1185_1188delTG | p.Ala396fs |
| A:T | | | CC | |
| 2:25246712:GC:G | NA | frameshift | c.1186delG | p.Ala396fs |
| 2:25246713:C:CA | rs1462007191 | frameshift | c.1185dupT | p.Ala396fs |
| 2:25246714:A:AG | NA | frameshift | c.1183_1184dupAC | p.Ala396fs |
| T | | | | |
| 2:25246714:AG:A | NA | frameshift | c.1184delC | p.Thr395fs |
| 2:25246714:AGT: | NA | frameshift | c.1183_1184delAC | p.Thr395fs |
| A | | | | |
| 2:25246715:G:GT | NA | frameshift | c.1183dupA | p.Thr395fs |
| 2:25246717:G:GT | NA | frameshift | c.1181dupA | p.Asp394fs |
| 2:25246718:T:TC | NA | frameshift | c.1180_1181insGA | p.Asp394fs |
| ACTCTCATCGCTC | | | GCGATGAGAGTG | |
| 2:25246718:T:TC | NA | frameshift | c.1161_1180dupCC | p.Asp394fs |
| ACTCTCATCGCTG | | | ACGACAGCGATGA | |
| TCGTGG | | | GAGTG | |
| 2:25246718:T:TC | NA | frameshift | c.1180_1181insGC | p.Asp394fs |
| ACTCTCATCGCTG | | | AGTCCCGGTGTGCC | |
| TCGTGGCACACCG | | | ACGACAGCGATGA | |
| GGACTGC | | | GAGTG | |
| 2:25246718:TCA: | NA | frameshift | c.1179_1180delTG | p.Ser393fs |
| T | | | | |
| 2:25246719:C:CA | NA | frameshift | c.1179dupT | p.Asp394fs |
| 2:25246719:CA:C | rs1224468033 | frameshift | c.1179delT | p.Ser393fs |
| 2:25246720:ACT: | NA | frameshift | c.1177_1178delAG | p.Ser393fs |
| A | | | | |
| 2:25246721:C:CG | NA | frameshift | c.1177_1178insTC | p.Ser393fs |
| A | | | | |
| 2:25246721:C:CT | NA | frameshift | c.1177dupA | p.Ser393fs |
| 2:25246721:CT:C | NA | frameshift | c.1177delA | p.Ser393fs |
| 2:25246722:TCTC | NA | frameshift | c.1170_1176delCG | p.Ser390fs |
| ATCG:T | | | ATGAG | |
| 2:25246723:C:CT | NA | frameshift | c.1175dupA | p.Ser393fs |
| 2:25246724:T:TC | NA | frameshift | c.1174_1175insCG | p.Glu392fs |
| ATCGCG | | | CGATG | |
| 2:25246725:C:A | rs1472367159 | stop_gained | c.1174G > T | p.Glu392* |
| 2:25246726:AT:A | NA | frameshift | c.1172delA | p.Asp391fs |
| 2:25246730:C:CT | NA | frameshift | c.1167_1168dupCA | p.Ser390fs |
| G | | | | |
| 2:25246730:C:G | NA | missense | c.1169G > C | p.Ser390Thr |
| 2:25246731:TG:T | NA | frameshift | c.1167delC | p.Asp389fs |
| 2:25246732:G:GT | NA | frameshift | c.1166dupA | p.Asp389fs |
| 2:25246733:TCGT | NA | frameshift | c.1150_1165delTTC | p.Phe384fs |
| GGCACACCGGGA | | | CCGGTGTGCCACG | |
| A:T | | | | |
| 2:25246735:G:GT | NA | frameshift | c.1163dupA | p.His388fs |
| 2:25246736:TG:T | NA | frameshift | c.1162delC | p.His388fs |
| 2:25246738:G:T | rs1364266797 | stop_gained | c.1161C > A | p.Cys387* |
| 2:25246740:AC:A | NA | frameshift | c.1158delG | p.Cys387fs |
| 2:25246740:ACAC | NA | frameshift | c.1145_1158delAG | p.Lys382fs |
| CGGGAACAGCT:A | | | CTGTTCCCGGTG | |
| 2:25246742:A:AC | NA | frameshift | c.1156dupG | p.Va1386fs |
| 2:25246742:A:AC | NA | frameshift | c.1149_1156dupGT | p.Va1386fs |
| CGGGAAC | | | TCCCGG | |
| 2:25246742:AC:A | NA | frameshift | c.1156delG | p.Va1386fs |
| 2:25246744:C:CG | NA | frameshift | c.1154dupC | p.Va1386fs |
| 2:25246744:C:CG | NA | frameshift | c.1148_1154dupTG | p.Cys387fs |
| GGAACA | | | TTCCC | |
| 2:25246744:CG:C | rs779418049 | frameshift | c.1154delC | p.Pro385fs |
| 2:25246744:CGG: | NA | frameshift | c.1153_1154delCC | p.Pro385fs |
| C | | | | |
| 2:25246744:CGG | NA | frameshift | c.1151_1154delTC | p.Phe384fs |
| GA:C | | | CC | |
| 2:25246744:CGG | NA | inframe_indel | c.1128_1154delCA | p.Ser377_Pro385 |
| GAACAGCTTCCCC | | | GCAGCCGCGCGGG | del |
| GCGCGGCTGCTG: | | | GAAGCTGTTCCC | |
| C | | | | |
| 2:25246745:GGG | NA | frameshift | c.1138_1153delGC | p.Ala380fs |
| AACAGCTTCCCCG | | | GGGGAAGCTGTTCC | |
| C:G | | | | |
| 2:25246747:G:GA | | frameshift | c.1151dupT | p.Va1386fs |
| 2:25246747:G:GT | rs1196506372 | frameshift | c.1151_1152insA | p.Phe384fs |
| 2:25246747:GA:G | NA | frameshift | c.1151delT | p.Phe384fs |
| 2:25246747:GAA | NA | inframe_indel | c.1125_1151delGG | p.Ala376_Phe384 |
| CAGCTTCCCCGCG | | | CCAGCAGCCGCGC | del |
| CGGCTGCTGGCC: | | | GGGGAAGCTGTT | |
| G | | | | |
| 2:25246750:C:CA | NA | frameshift | c.1148_1149insTT | p.Phe384fs |
| A | | | | |
| 2:25246750:CA:C | NA | frameshift | c.1148delT | p.Leu383fs |
| 2:25246751:A:AA | NA | frameshift | c.1147_1148insCT | p.Leu383fs |
| G | | | | |
| 2:25246751:AGCT | NA | frameshift | c.1143_1147delGA | p.Lys382fs |
| TC:A | | | AGC | |
| 2:25246751:AGCT | NA | frameshift | c.1140_1147delGG | p.Gly381fs |
| TCCCC:A | | | GGAAGC | |
| 2:25246753:CT:C | NA | frameshift | c.1145delA | p.Lys382fs |
| 2:25246755:T:A | NA | stop_gained | c.1144A > T | p.Lys382* |
| 2:25246755:TC:T | rs745939351 | frameshift | c.1143delG | p.Lys382fs |
| 2:25246758:CCG: | NA | frameshift | c.1139_1140delCG | p.Ala380fs |
| C | | | | |
| 2:25246758:CCGC | NA | frameshift | c.1127_1140delCC | p.Ala376fs |
| GCGGCTGCTGG:C | | | AGCAGCCGCGCG | |
| 2:25246759:CG:C | NA | frameshift | c.1139delC | p.Ala380fs |
| 2:25246760:G:T | NA | missense | c.1139C > A | p.Ala380Glu |
| 2:25246761:C:CA | NA | frameshift | c.1137_1138insT | p.Ala380fs |
| 2:25246761:C:G | NA | missense | c.1138G > C | p.Ala380Pro |
| 2:25246761:CGC | NA | splice_acceptor | c.1123- | p.Va1375_Ala380 |
| GGCTGCTGGCCAC | | | 2_1137delAGGTGG | del |
| CT:C | | | CCAGCAGCCGC | |
| 2:25246762:G:GC | NA | frameshift | c.1136dupG | p.Ala380fs |
| 2:25246762:GCG | NA | frameshift | c.1129_1136delAG | p.Ser377fs |
| GCTGCT:G | | | CAGCCG | |
| 2:25246763:C:A | NA | missense | c.1136G > T | p.Arg379Leu |
| 2:25246763:C:CG | NA | frameshift | c.1135dupC | p.Arg379fs |
| 2:25246763:C:G | NA | missense | c.1136G > C | p.Arg379Pro |
| 2:25246763:C:T | rs1036696061 | missense | c.1136G > A | p.Arg379His |
| 2:25246763:CG:C | NA | frameshift | c.1135delC | p.Arg379fs |
| 2:25246764:G:A | rs754459010 | missense | c.1135C > T | p.Arg379Cys |
| 2:25246764:G:C | NA | missense | c.1135C > G | p.Arg379Gly |
| 2:25246764:G:T | NA | missense | c.1135C > A | p.Arg379Ser |
| 2:25246765:G:T | NA | missense | c.1134C > A | p.Ser378Arg |
| 2:25246765:GCTG | NA | frameshift | c.1123_1133delGT | p.Va1375fs |
| CTGGCCAC:G | | | GGCCAGCAG | |
| 2:25246766:CT:C | NA | frameshift | c.1132delA | p.Ser378fs |
| 2:25246766:CTGC | NA | frameshift | c.1129_1132delAG | p.Ser377fs |
| T:C | | | CA | |
| 2:25246767:TG:T | NA | frameshift | c.1131delC | p.Ser377fs |
| 2:25246768:GC:G | NA | frameshift | c.1130delG | p.Ser377fs |
| 2:25246770:TG:T | NA | frameshift | c.1128delC | p.Ser377fs |
| 2:25246770:TGGC | NA | splice_acceptor | c.1123- | p.Va1375_Ser377 |
| CACCTGGA:T | | | 5_1128delTCCAGG | del |
| | | | TGGCC | |
| 2:25246772:G:A | NA | missense | c.1127C > T | p.Ala376Val |
| 2:25246772:G:T | NA | missense | c.1127C > A | p.Ala376Asp |
| 2:25246772:GCG | rs1383888539 | frameshift | c.1126delG | p.Ala376fs |
| 2:25246773:C:G | NA | missense | c.1126G > C | p.Ala376Pro |
| 2:25246773:C:T | rs1446942650 | missense | c.1126G > A | p.Ala376Thr |
| 2:25246773:CCA: | NA | frameshift | c.1124_1125delTG | p.Va1375fs |
| C | | | | |
| 2:25246773:CCAC | NA | splice_acceptor | c.1123- | p.Va1375_Ala376 |
| CTGGAGG:C | | | 7_1125delCCTCCA | del |
| | | | GGTG | |
| 2:25246773:CCAC | NA | splice_acceptor | c.1123- | p.Va1375_Ala376 |
| CTGGAGGGTGA:C | | | 11_1125delTCACCC | del |
| | | | TCCAGGTG | |
| 2:25246775:A:C | NA | missense | c.1124T > G | p.Va1375Gly |
| 2:25246775:AC:A | NA | frameshift | c.1123delG | p.Va1375fs |
| 2:25246776:CCTG | NA | splice_acceptor | c.1123-13_1123- | |
| GAGGGTGACA:C | | | 1delTGTCACCCTCC | |
| | | | AG | |
| 2:25246777:C:A | rs781118037 | splice_acceptor | c.1123-1G > T | |
| 2:25246777:C:G | NA | splice_acceptor | c.1123-1G > C | |
| 2:25246777:C:T | rs781118037 | splice_acceptor | c.1123-1G > A | |
| 2:25246777:CT:C | NA | splice_acceptor | c.1123-2delA | |
| 2:25246777:CTGG | NA | splice_acceptor | c.1123-11_1123- | |
| AGGGTGA:C | | | 2delTCACCCTCCA | |
| 2:25246777:CTGG | NA | splice_acceptor | c.1123-13_1123- | |
| AGGGTGACA:C | | | 2delTGTCACCCTCC | |
| | | | A | |
| 2:25246778:T:A | NA | splice_acceptor | c.1123-2A > T | |
| 2:25246778:T:C | rs752605931 | splice_acceptor | c.1123-2A > G | |
| 2:25246778:T:G | | splice_acceptor | c.1123-2A > C | |
| 2:25247048:CA:C | NA | splice_donor | c.1122+2delT | |
| 2:25247049:A:C | NA | splice_donor | c.1122+2T > G | |
| 2:25247049:A:G | NA | splice_donor | c.1122+2T > C | |
| 2:25247049:A:T | NA | splice_donor | c.1122+2T > A | |
| 2:25247049:AC:A | NA | splice_donor | c.1122+ldelG | |
| 2:25247050:C:G | NA | splice_donor | c.1122+1G > C | |
| 2:25247050:C:T | rs747220514 | splice_donor | c.1122+1G > A | |
| 2:25247051:CT:C | NA | frameshift | c.1121delA | p.Gln374fs |
| 2:25247052:T:A | NA | missense | c.1121A > T | p.Gln374Leu |
| 2:25247052:TG:T | NA | frameshift | c.1120delC | p.Gln374fs |
| 2:25247053:G:A | rs369109129 | stop_gained | c.1120C > T | p.Gln374* |
| 2:25247054:C:CT | NA | frameshift | c.1118_1119insA | p.Gln374fs |
| 2:25247055:A:C | NA | missense | c.1118T > G | p.Leu373Arg |
| 2:25247055:A:G | NA | missense | c.1118T > C | p.Leu373Pro |
| 2:25247055:A:T | rs748329208 | missense | c.1118T > A | p.Leu373Gln |
| 2:25247055:AG:A | NA | frameshift | c.1117delC | p.Leu373fs |
| 2:25247055:AGG | NA | frameshift | c.1105_1117delAT | p.Ile369fs |
| ACCTCGTAGAT:A | | | CTACGAGGTCC | |
| 2:25247056:G:C | NA | missense | c.1117C > G | p.Leu373Val |
| 2:25247057:G:GA | NA | frameshift | c.1115dupT | p.Leu373fs |
| 2:25247058:A:T | rs773722655 | missense | c.1115T > A | p.Va1372Asp |
| 2:25247058:AC:A | NA | frameshift | c.1114delG | p.Va1372fs |
| 2:25247058:ACCT: | NA | inframe_indel | c.1112_1114delAG | p.Glu371del |
| A | | | G | |
| 2:25247059:C:G | NA | missense | c.1114G > C | p.Va1372Leu |
| 2:25247059:C:T | rs371677904 | missense | c.1114G > A | p.Va1372Ile |
| 2:25247060:CT:C | NA | frameshift | c.1112delA | p.Glu371fs |
| 2:25247061:TC:T | NA | frameshift | c.1111delG | p.Glu371fs |
| 2:25247061:TCGT | NA | frameshift | c.1108_1111delTA | p.Tyr370fs |
| A:T | | | CG | |
| 2:25247062:C:A | rs1290621612 | stop_gained | c.1111G > T | p.Glu371* |
| 2:25247062:C:T | rs1290621612 | missense | c.1111G > A | p.Glu371Lys |
| 2:25247063:G:C | NA | stop_gained | c.1110C > G | p.Tyr370* |
| 2:25247063:G:T | NA | stop_gained | c.1110C > A | p.Tyr370* |
| 2:25247064:T:G | NA | missense | c.1109A > C | p.Tyr370Ser |
| 2:25247064:T:TA | NA | frameshift | c.1108dupT | p.Tyr370fs |
| 2:25247065:AG:A | NA | frameshift | c.1107delC | p.Tyr370fs |
| 2:25247065:AGAT | NA | frameshift | c.1103_1107delCC | p.Ala368fs |
| GG:A | | | ATC | |
| 2:25247066:G:GA | NA | inframe_indel | c.1092_1106dupGT | p.Met364_Ala368 |
| TGGCTTTGCGGTA | | | ACCGCAAAGCCAT | dup |
| C | | | | |
| 2:25247066:GAT | NA | inframe_indel | c.1092_1106delGT | p.Met364_Ala368 |
| GGCTTTGCGGTAC: | | | ACCGCAAAGCCAT | del |
| G | | | | |
| 2:25247067:A:C | NA | missense | c.1106T > G | p.Ile369Ser |
| 2:25247067:A:T | rs773941479 | missense | c.1106T > A | p.Ile369Asn |
| 2:25247068:T:A | NA | missense | c.1105A > T | p.Ile369Phe |
| 2:25247068:TG:T | NA | frameshift | c.1104delC | p.Ile369fs |
| 2:25247070:G:A | rs759087082 | missense | c.1103C > T | p.Ala368Val |
| 2:25247070:G:GC | NA | frameshift | c.1102dupG | p.Ala368fs |
| 2:25247070:G:T | NA | missense | c.1103C > A | p.Ala368Asp |
| 2:25247071:C:G | NA | missense | c.1102G > C | p.Ala368Pro |
| 2:25247071:C:T | rs1347653303 | missense | c.1102G > A | p.Ala368Thr |
| 2:25247071:CT:C | NA | frameshift | c.110ldelA | p.Ala368fs |
| 2:25247072:T:TTT | NA | inframe_indel | c.1080_1100dupCA | p.Asn360_Arg366 |
| GCGGTACATGGG | | | AGCAGCCCATGTAC | dup |
| CTGCTTG | | | CGCAA | |
| 2:25247072:TTTG | NA | frameshift | c.1088_1100delCC | p.Pro363fs |
| CGGTACATGG:T | | | ATGTACCGCAA | |
| 2:25247074:TG:T | NA | frameshift | c.1098delC | p.Ala368fs |
| 2:25247076:C:A | rs767236033 | missense | c.1097G > T | p.Arg366Leu |
| 2:25247076:C:CG | NA | frameshift | c.1093_1096dupTA | p.Arg366fs |
| GTA | | | CC | |
| 2:25247076:C:G | NA | missense | c.1097G > C | p.Arg366Pro |
| 2:25247076:C:T | rs767236033 | missense | c.1097G > A | p.Arg366His |
| 2:25247076:CG:C | NA | frameshift | c.1096delC | p.Arg366fs |
| 2:25247076:CGGT | NA | frameshift | c.1093_1096delTA | p.Tyr365fs |
| A:C | | | CC | |
| 2:25247077:G:A | NA | missense | c.1096C > T | p.Arg366Cys |
| 2:25247077:G:C | NA | missense | c.1096C > G | p.Arg366Gly |
| 2:25247077:G:T | NA | missense | c.1096C > A | p.Arg366Ser |
| 2:25247078:G:C | NA | stop_gained | c.1095C > G | p.Tyr365* |
| 2:25247078:G:T | NA | stop_gained | c.1095C > A | p.Tyr365* |
| 2:25247079:T:C | rs144062658 | missense | c.1094A > G | p.Tyr365Cys |
| 2:25247079:T:G | NA | missense | c.1094A > C | p.Tyr365Ser |
| 2:25247079:T:TA | NA | frameshift | c.1092_1093dupGT | p.Tyr365fs |
| C | | | | |
| 2:25247079:TA:T | NA | frameshift | c.1093delT | p.Tyr365fs |
| 2:25247080:A:G | rs1315257786 | missense | c.1093T > C | p.Tyr365His |
| 2:25247080:AC:A | NA | frameshift | c.1092delG | p.Met364fs |
| 2:25247080:ACAT | NA | frameshift | c.1088_1092delCC | p.Pro363fs |
| GG:A | | | ATG | |
| 2:25247083:TG:T | NA | frameshift | c.1089delC | p.Met364fs |
| 2:25247085:G:GG | NA | frameshift | c.1086_1087dupGC | p.Pro363fs |
| C | | | | |
| 2:25247088:T:G | NA | missense | c.1085A > C | p.Gln362Pro |
| 2:25247088:TG:T | rs749080312 | frameshift | c.1084delC | p.Gln362fs |
| 2:25247089:G:A | rs1490273086 | stop_gained | c.1084C > T | p.Gln362* |
| 2:25247089:G:GC | NA | frameshift | c.1083dupG | p.Gln362fs |
| 2:25247089:Gc.G | NA | frameshift | c.10083delG | p.Lys361fs |
| 2:25247090:CT:C | NA | frameshift | c.1082delA | p.Lys361fs |
| 2:25247090:CTTG: | NA | inframe_indel | c.1080_1082delCA | p.Asn360del |
| C | | | A | |
| 2:25247090:CTTG | NA | frameshift | c.1076_1082delAC | p.Tyr359fs |
| TTGT:C | | | AACAA | |
| 2:25247092:T:A | NA | stop_gained | c.1081A > T | p.Lys361* |
| 2:25247092:T:C | NA | missense | c.1081A > G | p.Lys361Glu |
| 2:25247093:G:GT | NA | frameshift | c.1079dupA | p.Asn360fs |
| 2:25247093:G:GT | NA | frameshift | c.1078_1079dupAA | p.Asn360fs |
| T | | | | |
| 2:25247094:T:TT | NA | frameshift | c.1075_1078dupTA | p.Asn360fs |
| GTA | | | CA | |
| 2:25247095:TG:T | NA | frameshift | c.1077delC | p.Tyr359fs |
| 2:25247096:G:C | NA | stop_gained | c.1077C > G | p.Tyr359* |
| 2:25247096:G:GT | NA | frameshift | c.1076dupA | p.Tyr359fs |
| 2:25247096:G:T | NA | stop_gained | c.1077C > A | p.Tyr359* |
| 2:25247098:A:T | NA | missense | c.1075T > A | p.Tyr359Asn |
| 2:25247098:AC:A | NA | frameshift | c.1074delG | p.Tyr359fs |
| 2:25247099:CG:C | NA | frameshift | c.1073delC | p.Thr358fs |
| 2:25247100:G:A | rs1191462913 | missense | c.1073C > T | p.Thr358Met |
| 2:25247100:G:T | NA | missense | c.1073C > A | p.Thr358Lys |
| 2:25247100:GT:G | NA | frameshift | c.1072delA | p.Thr358fs |
| 2:25247103:GC:G | NA | frameshift | c.1069delG | p.Ala357fs |
| 2:25247104:C:T | NA | missense | c.1069G > A | p.Ala357Thr |
| 2:25247105:CT:C | NA | frameshift | c.1067delA | p.Gln356fs |
| 2:25247106:TG:T | NA | frameshift | c.1066delC | p.Gln356fs |
| 2:25247106:TGGT | NA | inframe_indel | c.1055_1066delGT | p.Ser352_Gln356 |
| GGAACGCAC:T | | | GCGTTCCACC | delinsLys |
| 2:25247107:G:A | rs764062059 | stop_gained | c.1066C > T | p.Gln356* |
| 2:25247107:GGT | NA | frameshift | c.1056_1065delTG | p.Ala353fs |
| GGAACGCA:G | | | CGTTCCAC | |
| 2:25247109:T:TG | NA | frameshift | c.1063dupC | p.His355fs |
| 2:25247109:T:TG | NA | frameshift | c.1062_1063dupCC | p.His355fs |
| G | | | | |
| 2:25247109:TG:T | rs1274074419 | frameshift | c.1063delC | p.His355fs |
| 2:25247109:TGG | NA | frameshift | c.1051_1063delTG | p.Cys351fs |
| AACGCACTGCA:T | | | CAGTGCGTTCC | |
| 2:25247111:G:GA | NA | frameshift | c.1061_1062insTTA | p.His355fs |
| ACGCACTAA | | | GTGCGTT | |
| 2:25247111:GA:G | NA | frameshift | c.1061delT | p.Phe354fs |
| 2:25247111:GAA | NA | inframe_indel | c.1050_1061delTT | p.Cys351_Phe354 |
| CGCACTGCAA:G | | | GCAGTGCGTT | del |
| 2:25247112:A:C | NA | missense | c.1061T > G | p.Phe354Cys |
| 2:25247112:A:G | NA | missense | c.1061T > C | p.Phe354Ser |
| 2:25247112:AAC | NA | frameshift | c.1057_1060delGC | p.Ala353fs |
| GC:A | | | GT | |
| 2:25247113:A:AC | NA | frameshift | c.1058_1059dupCG | p.Phe354fs |
| G | | | | |
| 2:25247113:A:C | rs1161125109 | missense | c.1060T > G | p.Phe354Val |
| 2:25247113:AC:A | NA | frameshift | c.1059delG | p.Phe354fs |
| 2:25247114:CG:C | NA | frameshift | c.1058delC | p.Ala353fs |
| 2:25247115:G:A | rs1326972729 | missense | c.1058C > T | p.Ala353Val |
| 2:25247115:G:GC | NA | frameshift | c.1056_1057dupTG | p.Ala353fs |
| A | | | | |
| 2:25247115:GC:G | NA | frameshift | c.1057delG | p.Ala353fs |
| 2:25247116:CA:C | NA | frameshift | c.1056delT | p.Ser352fs |
| 2:25247117:AC:A | NA | frameshift | c.1055delG | p.Ser352fs |
| 2:25247117:ACT: | NA | frameshift | c.1054_1055delAG | p.Ser352fs |
| A | | | | |
| 2:25247118:C:T | rs139053291 | missense | c.1055G > A | p.Ser352Asn |
| 2:25247118:CT:C | NA | frameshift | c.1054delA | p.Ser352fs |
| 2:25247119:T:C | NA | missense | c.1054A > G | p.Ser352Gly |
| 2:25247119:T:TG | NA | frameshift | c.1031_1053dupTG | p.Ser352fs |
| CAAAACGAGCTCA | | | ATGCCGCTGAGCTC | |
| GCGGCATCA | | | GTTTTGC | |
| 2:25247119:TG:T | rs761025051 | frameshift | c.1053delC | p.Cys351fs |
| 2:25247120:G:T | NA | stop_gained | c.1053C > A | p.Cys351* |
| 2:25247120:GC:G | NA | frameshift | c.1052delG | p.Cys351fs |
| 2:25247121:C:CA | NA | frameshift | c.1051dupT | p.Cys351fs |
| 2:25247121:CA:C | | frameshift | c.1051delT | p.Cys351fs |
| 2:25247121:CAA: | NA | frameshift | c.1050_1051delTT | p.Phe350fs |
| C | | | | |
| 2:25247122:AAAA | NA | frameshift | c.1047_1050delGT | p.Phe350fs |
| C:A | | | TT | |
| 2:25247124:A:G | NA | missense | c.1049T > C | p.Phe350Ser |
| 2:25247125:AC:A | NA | frameshift | c.1047delG | p.Cys351fs |
| 2:25247127:G:A | NA | missense | c.1046C > T | p.Ser349Leu |
| 2:25247127:G:GA | NA | frameshift | c.1045dupT | p.Ser349fs |
| 2:25247127:G:T | rs1297885007 | stop_gained | c.1046C > A | p.Ser349* |
| 2:25247129:GC:G | NA | frameshift | c.1043delG | p.Ser348fs |
| 2:25247130:C:T | NA | missense | c.1043G > A | p.Ser348Asn |
| 2:25247130:CTCA: | NA | inframe_indel | c.1040_1042delTG | p.Leu347_Ser348 |
| C | | | A | delinsArg |
| 2:25247130:CTCA | NA | inframe_indel | c.1034_1042delTG | p.Met345_Leu347 |
| GCGGCA:C | | | CCGCTGA | del |
| 2:25247131:T:A | NA | missense | c.1042A > T | p.Ser348Cys |
| 2:25247131:T:TC | NA | frameshift | c.1038_1041dupGC | p.Ser348fs |
| AGC | | | TG | |
| 2:25247132:C:CA | NA | frameshift | c.1040dupT | p.Ser348fs |
| 2:25247133:A:C | NA | missense | c.1040T > G | p.Leu347Arg |
| 2:25247133:A:G | rs1474463141 | missense | c.1040T > C | p.Leu347Pro |
| 2:25247133:A:T | NA | missense | c.1040T > A | p.Leu347Gln |
| 2:25247133:AG:A | NA | frameshift | c.1039delC | p.Leu347fs |
| 2:25247133:AGC | NA | inframe_indel | c.1037_1039delCG | p.Pro346del |
| G:A | | | C | |
| 2:25247135:CG:C | NA | frameshift | c.1037delC | p.Pro346fs |
| 2:25247136:G:A | rs1308281604 | missense | c.1037C > T | p.Pro346Leu |
| 2:25247136:G:GG | NA | frameshift | c.1032_1036dupG | p.Pro346fs |
| CATC | | | ATGC | |
| 2:25247137:G:GC | NA | frameshift | c.1035dupG | p.Pro346fs |
| 2:25247137:G:T | NA | missense | c.1036C > A | p.Pro346Thr |
| 2:25247138:CA:C | NA | frameshift | c.1034delT | p.Met345fs |
| 2:25247139:A:AC | NA | frameshift | c.1033_1034insG | p.Met345fs |
| 2:25247139:AT:A | NA | frameshift | c.1033delA | p.Met345fs |
| 2:25247139:ATCA | NA | frameshift | c.1021_1033delGT | p.Va1341fs |
| GCTTCTCAAC:A | | | TGAGAAGCTGA | |
| 2:25247141:C:CA | NA | frameshift | c.1031_1032insAT | p.Met345fs |
| T | | | | |
| 2:25247141:CA:C | NA | frameshift | c.1031delT | p.Leu344fs |
| 2:25247141:CAGC | NA | frameshift | c.1016_1031delTG | p.Va1339fs |
| TTCTCAACACACA: | | | TGTGTTGAGAAGCT | |
| C | | | | |
| 2:25247142:A:C | rs749817324 | missense | c.1031T > G | p.Leu344Arg |
| 2:25247142:A:G | rs749817324 | missense | c.1031T > C | p.Leu344Pro |
| 2:25247142:A:T | rs749817324 | missense | c.1031T > A | p.Leu344Gln |
| 2:25247142:AG:A | NA | frameshift | c.1030delC | p.Leu344fs |
| 2:25247143:G:T | NA | missense | c.1030C > A | p.Leu344Met |
| 2:25247144:CT:C | NA | frameshift | c.1028delA | p.Lys343fs |
| 2:25247145:T:C | NA | missense | c.1028A > G | p.Lys343Arg |
| 2:25247146:T:A | NA | stop_gained | c.1027A > T | p.Lys343* |
| 2:25247146:T:TG | NA | frameshift | c.1026_1027insCTT | p.Lys343fs |
| TCCCCCCAGGTGT | | | CTCAACACACACCT | |
| GTGTTGAGAAG | | | GGGGGGAC | |
| 2:25247147:CT:C | NA | frameshift | c.1025delA | p.Glu342fs |
| 2:25247148:TC:T | NA | frameshift | c.1024delG | p.Glu342fs |
| 2:25247149:C:A | NA | stop_gained | c.1024G > T | p.Glu342* |
| 2:25247149:CAAC | NA | frameshift | c.1020_1023delTG | p.Cys340fs |
| A:C | | | TT | |
| 2:25247150:A:AA | rs768966400 | frameshift | c.1021_1022dupGT | p.Glu342fs |
| C | | | | |
| 2:25247150:AAC: | rs1201885886 | frameshift | c.1021_1022delGT | p.Va1341fs |
| A | | | | |
| 2:25247150:AACA | NA | frameshift | c.1019_1022delGT | p.Cys340fs |
| C:A | | | GT | |
| 2:25247151:A:AC | NA | frameshift | c.1015_1021dupGT | p.Va1341fs |
| ACACAC | | | GTGTG | |
| 2:25247151:AC:A | NA | frameshift | c.1021delG | p.Va1341fs |
| 2:25247151:ACAC | NA | frameshift | c.1015- | p.Va1339fs |
| ACACCT:A | | | 2_1021delAGGTGT | |
| | | | GTG | |
| 2:25247152:CACA | NA | splice_accepto | c.1015- | p.Va1339_Va1341d |
| CACCTGGGGG:C | | r | 7_1020delCCCCCA | el |
| | | | GGTGTGT | |
| 2:25247153:A:T | NA | stop_gained | c.1020T > A | p.Cys340* |
| 2:25247153:AC:A | NA | frameshift | c.1019delG | p.Cys340fs |
| 2:25247153:ACAC | NA | frameshift | c.1015_1019delGT | p.Va1339fs |
| AC:A | | | GTG | |
| 2:25247156:C:CA | NA | frameshift | c.1016dupT | p.Cys340fs |
| 2:25247156:C:CA | NA | frameshift | c.1015- | p.Cys340fs |
| CCT | | | 2_1016dupAGGT | |
| 2:25247156:CA:C | NA | frameshift | c.1016delT | p.Va1339fs |
| 2:25247156:CACC | NA | frameshift | c.1015- | p.Va1341fs |
| TG:C | | | 3_1016delCAGGT | |
| 2:25247156:CACC | NA | frameshift | c.1015- | p.Va1341fs |
| TGGGGGG:C | | | 8_1016delCCCCCC | |
| | | | AGGT | |
| 2:25247157:A:AC | rs773201456 | frameshift | c.1015dupG | p.Va1339fs |
| 2:25247157:A:C | rs1221845015 | missense | c.1016T > G | p.Va1339Gly |
| 2:25247157:AC:A | rs34203089 | frameshift | c.1015delG | p.Va1339fs |
| 2:25247159:C:A | rs1458692279 | splice_acceptor | c.1015-1G > T | |
| 2:25247159:C:G | NA | splice_acceptor | c.1015-1G > C | |
| 2:25247159:C:T | NA | splice_acceptor | c.1015-1G > A | |
| 2:25247159:CT:C | rs762753119 | splice_acceptor | c.1015-2delA | |
| 2:25247160:T:A | rs920946076 | splice_acceptor | c.1015-2A > T | |
| 2:25247160:T:C | rs920946076 | splice_acceptor | c.1015-2A > G | |
| 2:25247160:T:G | NA | splice_acceptor | c.1015-2A > C | |
| 2:25247588:T:TA | NA | splice_donor | c.1014+2dupT | |
| 2:25247588:TACC | NA | frameshift | c.1014_1014+2del | p.Va1339fs |
| T | | | GGT | |
| 2:25247589:A:C | rs1258308759 | splice_donor | c.1014+2T > G | |
| 2:25247589:A:G | NA | splice_donor | c.1014+2T > C | |
| 2:25247589:A:T | NA | splice_donor | c.1014+2T > A | |
| 2:25247589:AC:A | NA | splice_donor | c.1014+1delG | |
| 2:25247589:ACCA | NA | frameshift | c.1010_1014+1del | p.Ser337fs |
| CTG:A | | | CAGTGG | |
| 2:25247590:C:A | NA | splice_donor | c.1014+1G > T | |
| 2:25247590:C:G | NA | splice_donor | c.1014+1G > C | |
| 2:25247590:C:T | NA | splice_donor | c.1014+1G > A | |
| 2:25247590:CCA: | NA | frameshift | c.1013_1014delTG | p.Va1338fs |
| C | | | | |
| 2:25247591:CA:C | NA | frameshift | c.1013delT | p.Va1338fs |
| 2:25247591:CACT | NA | frameshift | c.1007_1013delTCT | p.Phe336fs |
| GAGA:C | | | CAGT | |
| 2:25247593:C:CT | NA | frameshift | c.986_1011dupTGT | p.Va1338fs |
| GAGAATTTGCCGT | | | GGTTCGGAGACGG | |
| CTCCGAACCACA | | | CAAATTCTCA | |
| 2:25247593:C:T | NA | missense | c.1012G > A | p.Va1338Met |
| 2:25247594:T:TG | NA | frameshift | c.1009_1010dupTC | p.Va1338fs |
| A | | | | |
| 2:25247594:TG:T | rs1212817360 | frameshift | c.1010delC | p.Ser337fs |
| 2:25247595:G:A | rs773208295 | missense | c.1010C > T | p.Ser337Leu |
| 2:25247595:G:C | rs773208295 | stop_gained | c.1010C > G | p.Ser337* |
| 2:25247595:G:T | rs773208295 | stop_gained | c.1010C > A | p.Ser337* |
| 2:25247595:GAG | NA | inframe_indel | c.1007_1009delTCT | p.Phe336del |
| A:G | | | | |
| 2:25247596:A:G | NA | missense | c.1009T > C | p.Ser337Pro |
| 2:25247597:G:GA | NA | frameshift | c.1007_1008insAT | p.Phe336fs |
| T | | | | |
| 2:25247597:GA:G | NA | frameshift | c.1007delT | p.Phe336fs |
| 2:25247597:GAA: | NA | frameshift | c.1006_1007delTT | p.Phe336fs |
| G | | | | |
| 2:25247597:GAAT | NA | frameshift | c.1004_1007delAA | p.Lys335fs |
| T:G | | | TT | |
| 2:25247598:A:AA | NA | stop_gained | c.1004_1006dupAA | p.Lys335_Phe336 |
| TT | | | T | insTer |
| 2:25247598:AATT | NA | frameshift | c.994_1006delGGA | p.Gly332fs |
| TGCCGTCTCC:A | | | GACGGCAAAT | |
| 2:25247599:AT:A | NA | frameshift | c.1005delA | p.Lys335fs |
| 2:25247600:TTTG | NA | frameshift | c.982_1004delGTC | p.Va1328fs |
| CCGTCTCCGAACC | | | ATGTGGTTCGGAGA | |
| ACATGAC:T | | | CGGCAA | |
| 2:25247602:T:A | NA | stop_gained | c.1003A > T | p.Lys335* |
| 2:25247603:GC:G | NA | frameshift | c.1001delG | p.Gly334fs |
| 2:25247605:C:CT | NA | frameshift | c.999_1000insA | p.Gly334fs |
| 2:25247605:C:T | rs1024296111 | missense | c.1000G > A | p.Gly334Ser |
| 2:25247605:CG:C | NA | frameshift | c.999delC | p.Asp333fs |
| 2:25247605:CGTC | NA | frameshift | c.996_999delAGAC | p.Asp333fs |
| T:C | | | | |
| 2:25247606:GTC: | NA | frameshift | c.997_998delGA | p.Asp333fs |
| G | | | | |
| 2:25247607:T:A | NA | missense | c.998A > T | p.Asp333Val |
| 2:25247608:C:CT | NA | frameshift | c.993_996dupCGG | p.Asp333fs |
| CCG | | | A | |
| 2:25247608:CTCC | NA | frameshift | c.992_996delTCGG | p.Phe331fs |
| GA:C | | | A | |
| 2:25247609:TCCG | NA | frameshift | c.974_995delCCCG | p.Thr325fs |
| AACCACATGACCC | | | CTGGGTCATGTGGT | |
| AGCGGG:T | | | TCGG | |
| 2:25247610:C:A | NA | missense | c.995G > T | p.Gly332Val |
| 2:25247610:C:T | rs751360082 | missense | c.995G > A | p.Gly332Glu |
| 2:25247611:C:A | rs760854242 | stop_gained | c.994G > T | p.Gly332* |
| 2:25247611:C:T | rs760854242 | missense | c.994G > A | p.Gly332Arg |
| 2:25247611:CG:C | NA | frameshift | c.993delC | p.Phe331fs |
| 2:25247612:GA:G | NA | frameshift | c.992delT | p.Phe331fs |
| 2:25247613:AACC: | rs755832478 | inframe_indel | c.989_991delGGT | p.Trp330del |
| A | | | | |
| 2:25247614:A:C | rs753896945 | missense | c.991T > G | p.Phe331Val |
| 2:25247614:A:T | NA | missense | c.991T > A | p.Phe331Ile |
| 2:25247614:AC:A | rs777388989 | frameshift | c.990delG | p.Trp330fs |
| 2:25247615:C:A | NA | missense | c.990G > T | p.Trp330Cys |
| 2:25247615:C:T | rs757340349 | stop_gained | c.990G > A | p.Trp330* |
| 2:25247615:CCAC | NA | inframe_indel | c.984_989delCATG | p.Met329_Trp330 |
| ATG:C | | | TG | del |
| 2:25247615:CCAC | NA | frameshift | c.979_989delTGGG | p.Trp327fs |
| ATGACCCA:C | | | TCATGTG | |
| 2:25247616:C:A | NA | missense | c.989G > T | p.Trp330Leu |
| 2:25247616:C:T | rs1479473205 | stop_gained | c.989G > A | p.Trp330* |
| 2:25247616:CACA | NA | frameshift | c.984_988delCATG | p.Met329fs |
| TG:C | | | T | |
| 2:25247617:ACAT | NA | frameshift | c.978_987delCTGG | p.Trp327fs |
| GACCCAG:A | | | GTCATG | |
| 2:25247618:C:CA | NA | frameshift | c.986dupT | p.Met329fs |
| 2:25247618:C:T | NA | missense | c.987G > A | p.Met329Ile |
| 2:25247619:A:G | NA | missense | c.986T > C | p.Met329Thr |
| 2:25247619:AT:A | NA | frameshift | c.985delA | p.Met329fs |
| 2:25247621:GA:G | NA | frameshift | c.983delT | p.Va1328fs |
| 2:25247622:A:AC | NA | frameshift | c.982dupG | p.Va1328fs |
| 2:25247622:A:C | NA | missense | c.983T > G | p.Va1328Gly |
| 2:25247622:A:G | NA | missense | c.983T > C | p.Va1328Ala |
| 2:25247622:A:T | NA | missense | c.983T > A | p.Va1328Asp |
| 2:25247622:ACCC | NA | frameshift | c.972_982delCACC | p.Thr325fs |
| AGCGGGTG:A | | | CGCTGGG | |
| 2:25247623:C:A | NA | missense | c.982G > T | p.Va1328Phe |
| 2:25247624:C:T | NA | stop_gained | c.981G > A | p.Trp327* |
| 2:25247625:C:A | NA | missense | c.980G > T | p.Trp327Leu |
| 2:25247625:C:CA | NA | frameshift | c.979dupT | p.Trp327fs |
| 2:25247625:C:T | rs750966422 | stop_gained | c.980G > A | p.Trp327* |
| 2:25247625:CAGC | NA | frameshift | c.966_979delTGAA | p.Glu323fs |
| GGGTGCCTTCA:C | | | GGCACCCGCT | |
| 2:25247626:AG:A | NA | frameshift | c.978delC | p.Trp327fs |
| 2:25247627:GC:G | NA | frameshift | c.977delG | p.Arg326fs |
| 2:25247627:GCG | NA | frameshift | c.971_977delGCAC | p.Gly324fs |
| GGTGC:G | | | CCG | |
| 2:25247628:C:A | rs758881009 | missense | c.977G > T | p.Arg326Leu |
| 2:25247628:C:CA | NA | frameshift | c.976_977insAGCG | p.Arg326fs |
| GCTGAAGGCACCC | | | GGTGCCTTCAGCT | |
| GCT | | | | |
| 2:25247628:C:CG | NA | frameshift | c.976dupC | p.Arg326fs |
| 2:25247628:C:G | NA | missense | c.977G > C | p.Arg326Pro |
| 2:25247628:C:T | rs758881009 | missense | c.977G > A | p.Arg326His |
| 2:25247628:CG:C | NA | frameshift | c.976delC | p.Arg326fs |
| 2:25247629:G:A | rs747448117 | missense | c.976C > T | p.Arg326Cys |
| 2:25247629:G:C | NA | missense | c.976C > G | p.Arg326Gly |
| 2:25247629:G:T | rs747448117 | missense | c.976C > A | p.Arg326Ser |
| 2:25247631:GT:G | NA | frameshift | c.973delA | p.Thr325fs |
| 2:25247631:GTGC | NA | frameshift | c.964_973delGCTG | p.Ala322fs |
| CTTCAGC:G | | | AAGGCA | |
| 2:25247632:T:TG | NA | frameshift | c.972dupC | p.Thr325fs |
| 2:25247632:TG:T | NA | frameshift | c.972delC | p.Thr325fs |
| 2:25247633:G:GC | NA | frameshift | c.971dupG | p.Thr325fs |
| 2:25247633:GC:G | NA | frameshift | c.971delG | p.Gly324fs |
| 2:25247634:C:A | NA | missense | c.971G > T | p.Gly324Val |
| 2:25247637:TCAG | NA | inframe_indel | c.947_967delCGGG | p.Thr316_Glu323 |
| CTGCTCGGCTCCG | | | CCGGAGCCGAGCA | delinsLys |
| GCCCG:T | | | GCTG | |
| 2:25247638:C:A | NA | stop_gained | c.967G > T | p.Glu323* |
| 2:25247638:CA:C | NA | frameshift | c.966delT | p.Glu323fs |
| 2:25247639:AG:A | NA | frameshift | c.965delC | p.Ala322fs |
| 2:25247640:GCTG | NA | frameshift | c.954_964delGAGC | p.Ser319fs |
| CTCGGCTC:G | | | CGAGCAG | |
| 2:25247641:C:CT | NA | frameshift | c.963dupA | p.Ala322fs |
| 2:25247641:CT:C | NA | frameshift | c.963delA | p.Ala322fs |
| 2:25247642:TG:T | NA | frameshift | c.962delC | p.Ala321fs |
| 2:25247644:C:CT | NA | frameshift | c.960_961insACCG | p.Ala321fs |
| CGGT | | | A | |
| 2:25247646:C:T | NA | missense | c.959G > A | p.Arg320Gln |
| 2:25247646:CG:C | NA | frameshift | c.958delC | p.Arg320fs |
| 2:25247647:G:A | rs778270132 | stop_gained | c.958C > T | p.Arg320* |
| 2:25247648:G:T | NA | missense | c.957C > A | p.Ser319Arg |
| 2:25247649:CT:C | NA | frameshift | c.955delA | p.Ser319fs |
| 2:25247650:T:TCC | NA | frameshift | c.950_954dupGCC | p.Ser319fs |
| GGC | | | GG | |
| 2:25247650:TC:T | NA | frameshift | c.954delG | p.Ser319fs |
| 2:25247652:C:CG | NA | frameshift | c.952dupC | p.Arg318fs |
| 2:25247652:CG:C | NA | frameshift | c.952delC | p.Arg318fs |
| 2:25247652:CGG: | NA | frameshift | c.951_952delCC | p.Arg318fs |
| C | | | | |
| 2:25247654:G:GC | NA | frameshift | c.950dupG | p.Arg318fs |
| 2:25247654:GC:G | NA | frameshift | c.950delG | p.Gly317fs |
| 2:25247654:GCCC | NA | frameshift | c.946_950delACGG | p.Thr316fs |
| GT:G | | | G | |
| 2:25247655:CCCG | NA | frameshift | c.943_949delATGA | p.Met315fs |
| TCAT:C | | | CGG | |
| 2:25247658:GT:G | NA | frameshift | c.946delA | p.Thr316fs |
| 2:25247661:AT:A | NA | frameshift | c.943delA | p.Met315fs |
| 2:25247661:ATCC | NA | frameshift | c.939_943delGTGG | p.Trp313fs |
| AC:A | | | A | |
| 2:25247662:TC:T | NA | frameshift | c.942delG | p.Trp314fs |
| 2:25247662:TCC:T | NA | frameshift | c.941_942delGG | p.Trp314fs |
| 2:25247662:TCCA | NA | frameshift | c.936_942delTTGG | p.Trp313fs |
| CCAA:T | | | TGG | |
| 2:25247662:TCCA | NA | frameshift | c.929_942delTTGT | p.Ile310fs |
| CCAAGACACAA:T | | | GTCTTGGTGG | |
| 2:25247663:C:T | rs772972939 | stop_gained | c.942G > A | p.Trp314* |
| 2:25247663:CCA: | NA | frameshift | c.940_941delTG | p.Trp314fs |
| C | | | | |
| 2:25247663:CCAC | NA | frameshift | c.934_941delTCTT | p.Ser312fs |
| CAAGA:C | | | GGTG | |
| 2:25247664:C:T | rs749225216 | stop_gained | c.941G > A | p.Trp314* |
| 2:25247664:CA:C | NA | frameshift | c.940delT | p.Trp314fs |
| 2:25247665:A:AC | NA | frameshift | c.939dupG | p.Trp314fs |
| 2:25247665:A:AC | NA | frameshift | c.938_939dupGG | p.Trp314fs |
| C | | | | |
| 2:25247665:AC:A | NA | frameshift | c.939delG | p.Trp313fs |
| 2:25247666:C:T | rs770813937 | stop_gained | c.939G > A | p.Trp313* |
| 2:25247667:C:CA | NA | frameshift | c.937dupT | p.Trp313fs |
| 2:25247667:C:T | rs1204478457 | stop_gained | c.938G > A | p.Trp313* |
| 2:25247667:CA:C | NA | frameshift | c.937delT | p.Trp313fs |
| 2:25247670:G:A | NA | missense | c.935C > T | p.Ser312Phe |
| 2:25247670:G:T | NA | missense | c.935C > A | p.Ser312Tyr |
| 2:25247670:GA:G | NA | frameshift | c.934delT | p.Ser312fs |
| 2:25247670:GAC: | NA | frameshift | c.933_934delGT | p.Ser312fs |
| G | | | | |
| 2:25247671:AC:A | NA | frameshift | c.933delG | p.Ser312fs |
| 2:25247672:C:CA | NA | frameshift | c.932dupT | p.Ser312fs |
| 2:25247672:CA:C | NA | frameshift | c.932delT | p.Va1311fs |
| 2:25247673:A:C | NA | missense | c.932T > G | p.Va1311Gly |
| 2:25247674:C:A | NA | missense | c.931G > T | p.Va1311Leu |
| 2:25247674:C:CA | NA | frameshift | c.930dupT | p.Va1311fs |
| 2:25247674:C:CA | NA | frameshift | c.929_930dupTT | p.Va1311fs |
| A | | | | |
| 2:25247674:CA:C | NA | frameshift | c.930delT | p.Ile310fs |
| 2:25247675:A:C | NA | missense | c.930T > G | p.Ile310Met |
| 2:25247676:A:C | NA | missense | c.929T > G | p.Ile310Ser |
| 2:25247676:A:G | NA | missense | c.929T > C | p.Ile310Thr |
| 2:25247676:A:T | rs587777508 | missense | c.929T > A | p.Ile310Asn |
| 2:25247676:AT:A | NA | frameshift | c.928delA | p.Ile310fs |
| 2:25247677:T:A | rs774128516 | missense | c.928A > T | p.Ile310Phe |
| 2:25247677:T:G | NA | missense | c.928A > C | p.Ile310Leu |
| 2:25247679:c.G | | missense | c.926G > C | p.Arg309Pro |
| 2:25247679:CG:C | NA | frameshift | c.925delC | p.Arg309fs |
| 2:25247680:G:A | NA | missense | c.925C > T | p.Arg309Cys |
| 2:25247680:G:C | NA | missense | c.925C > G | p.Arg309Gly |
| 2:25247680:G:GG | NA | frameshift | c.923_924dupGC | p.Arg309fs |
| C | | | | |
| 2:25247681:GC:G | NA | frameshift | c.923delG | p.Gly308fs |
| 2:25247682:C:A | NA | missense | c.923G > T | p.Gly308Val |
| 2:25247682:C:T | NA | missense | c.923G > A | p.Gly308Asp |
| 2:25247683:C:CT | NA | frameshift | c.921dupA | p.Gly308fs |
| 2:25247683:C:G | NA | missense | c.922G > C | p.Gly308Arg |
| 2:25247683:C:T | NA | missense | c.922G > A | p.Gly308Ser |
| 2:25247683:CT:C | NA | frameshift | c.921delA | p.Gly308fs |
| 2:25247684:TG:T | NA | frameshift | c.920delC | p.Pro307fs |
| 2:25247684:TGGC | NA | frameshift | c.907_920delTTCTC | p.Phe303fs |
| CACCAGGAGAA:T | | | CTGGTGGCC | |
| 2:25247685:G:A | rs759380437 | missense | c.920C > T | p.Pro307Leu |
| 2:25247685:G:C | rs759380437 | missense | c.920C > G | p.Pro307Arg |
| 2:25247685:G:T | rs759380437 | missense | c.920C > A | p.Pro307Gln |
| 2:25247686:G:A | NA | missense | c.919C > T | p.Pro307Ser |
| 2:25247686:G:C | NA | missense | c.919C > G | p.Pro307Ala |
| 2:25247686:G:T | NA | missense | c.919C > A | p.Pro307Thr |
| 2:25247686:GC:G | NA | frameshift | c.918delG | p.Trp306fs |
| 2:25247686:GCC: | NA | frameshift | c.917_918delGG | p.Trp306fs |
| G | | | | |
| 2:25247687:C:A | rs776841024 | missense | c.918G > T | p.Trp306Cys |
| 2:25247687:C:CC | NA | frameshift | c.916_917dupTG | p.Trp306fs |
| A | | | | |
| 2:25247687:C:G | NA | missense | c.918G > C | p.Trp306Cys |
| 2:25247687:C:T | rs776841024 | stop_gained | c.918G > A | p.Trp306* |
| 2:25247688:C:A | NA | missense | c.917G > T | p.Trp306Leu |
| 2:25247688:C:G | NA | missense | c.917G > C | p.Trp306Ser |
| 2:25247688:C:T | rs1465829182 | stop_gained | c.917G > A | p.Trp306* |
| 2:25247688:CA:C | NA | frameshift | c.916delT | p.Trp306fs |
| 2:25247689:A:C | NA | missense | c.916T > G | p.Trp306Gly |
| 2:25247689:AC:A | NA | frameshift | c.915delG | p.Trp305fs |
| 2:25247689:ACCA | NA | frameshift | c.912_915delCTGG | p.Trp305fs |
| G:A | | | | |
| 2:25247690:C:A | NA | missense | c.915G > T | p.Trp305Cys |
| 2:25247690:C:T | rs761839006 | stop_gained | c.915G > A | p.Trp305* |
| 2:25247691:C:CA | NA | frameshift | c.907_913dupTTCT | p.Trp305fs |
| GGAGAA | | | CCT | |
| 2:25247691:C:G | NA | missense | c.914G > C | p.Trp305Ser |
| 2:25247691:C:T | rs765341003 | stop_gained | c.914G > A | p.Trp305* |
| 2:25247691:CA:C | NA | frameshift | c.913delT | p.Trp305fs |
| 2:25247691:CAG: | NA | frameshift | c.912_913delCT | p.Trp305fs |
| C | | | | |
| 2:25247692:A:G | NA | missense | c.913T > C | p.Trp305Arg |
| 2:25247693:G:GA | NA | frameshift | c.911_912insT | p.Trp305fs |
| 2:25247693:GGA: | NA | frameshift | c.910_911delTC | p.Ser304fs |
| G | | | | |
| 2:25247694:G:A | NA | missense | c.911C > T | p.Ser304Phe |
| 2:25247694:GA:G | NA | frameshift | c.910delT | p.Ser304fs |
| 2:25247695:AG:A | NA | frameshift | c.909delC | p.Ser304fs |
| 2:25247696:G:C | NA | missense | c.909C > G | p.Phe303Leu |
| 2:25247696:GA:G | NA | frameshift | c.908delT | p.Phe303fs |
| 2:25247699:GC:G | NA | frameshift | c.905delG | p.Gly302fs |
| 2:25247700:C:T | NA | missense | c.905G > A | p.Gly302Asp |
| 2:25247701:C:A | NA | missense | c.904G > T | p.Gly302Cys |
| 2:25247701:C:T | rs377670596 | missense | c.904G > A | p.Gly302Ser |
| 2:25247703:C:T | NA | missense | c.902G > A | p.Arg301Gln |
| 2:25247703:CG:C | NA | frameshift | c.901delC | p.Arg301fs |
| 2:25247704:G:A | NA | missense | c.901C > T | p.Arg301Trp |
| 2:25247704:GC:G | NA | frameshift | c.900delG | p.Arg301fs |
| 2:25247704:GCA | NA | frameshift | c.891_900delGGGG | p.Trp297fs |
| GTTTCCCC:G | | | AAACTG | |
| 2:25247705:CA:C | NA | frameshift | c.899delT | p.Leu300fs |
| 2:25247706:A:T | NA | missense | c.899T > A | p.Leu300Gln |
| 2:25247707:G:T | NA | missense | c.898C > A | p.Leu300Met |
| 2:25247707:GT:G | | frameshift | c.897delA | p.Lys299fs |
| 2:25247708:T:A | NA | missense | c.897A > T | p.Lys299Asn |
| 2:25247708:T:G | NA | missense | c.897A > C | p.Lys299Asn |
| 2:25247709:T:G | NA | missense | c.896A > C | p.Lys299Thr |
| 2:25247710:T:A | rs766858016 | stop_gained | c.895A > T | p.Lys299* |
| 2:25247710:T:C | NA | missense | c.895A > G | p.Lys299Glu |
| 2:25247710:T:G | rs766858016 | missense | c.895A > C | p.Lys299Gln |
| 2:25247710:T:TC | rs1157280960 | frameshift | c.894dupG | p.Lys299fs |
| 2:25247710:TC:T | NA | frameshift | c.894delG | p.Lys299fs |
| 2:25247712:C:T | rs1410828051 | missense | c.893G > A | p.Gly298Glu |
| 2:25247713:C:A | rs797044904 | missense | c.892G > T | p.Gly298Trp |
| 2:25247713:C:G | NA | missense | c.892G > C | p.Gly298Arg |
| 2:25247713:C:T | rs797044904 | missense | c.892G > A | p.Gly298Arg |
| 2:25247714:C:A | NA | missense | c.891G > T | p.Trp297Cys |
| 2:25247714:C:G | NA | missense | c.891G > C | p.Trp297Cys |
| 2:25247714:C:T | rs1442214131 | stop_gained | c.891G > A | p.Trp297* |
| 2:25247715:C:G | NA | missense | c.890G > C | p.Trp297Ser |
| 2:25247715:C:T | rs944608317 | stop_gained | c.890G > A | p.Trp297* |
| 2:25247716:A:AC | NA | frameshift | c.888dupG | p.Trp297fs |
| 2:25247716:A:C | rs751916447 | missense | c.889T > G | p.Trp297Gly |
| 2:25247716:A:G | rs751916447 | missense | c.889T > C | p.Trp297Arg |
| 2:25247716:A:T | NA | missense | c.889T > A | p.Trp297Arg |
| 2:25247716:AC:A | NA | frameshift | c.888delG | p.Trp297fs |
| 2:25247716:ACAC | NA | frameshift | c.879_888delGGAG | p.Glu294fs |
| CAGCTCC:A | | | CTGGTG | |
| 2:25247716:ACAC | NA | frameshift | c.878_888delGGGA | p.Gly293fs |
| CAGCTCCC:A | | | GCTGGTG | |
| 2:25247718:A:AC | NA | frameshift | c.886dupG | p.Va1296fs |
| 2:25247718:A:C | rs1402705749 | missense | c.887T > G | p.Va1296Gly |
| 2:25247718:A:T | rs1402705749 | missense | c.887T > A | p.Va1296Glu |
| 2:25247718:AC:A | NA | frameshift | c.886delG | p.Va1296fs |
| 2:25247719:C:A | NA | missense | c.886G > T | p.Va1296Leu |
| 2:25247719:C:G | rs755398725 | missense | c.886G > C | p.Va1296Leu |
| 2:25247719:C:T | rs755398725 | missense | c.886G > A | p.Va1296Met |
| 2:25247721:A:AG | NA | frameshift | c.882_883dupGC | p.Leu295fs |
| C | | | | |
| 2:25247721:A:C | NA | missense | c.884T > G | p.Leu295Arg |
| 2:25247721:A:G | NA | missense | c.884T > C | p.Leu295Pro |
| 2:25247721:A:T | NA | missense | c.884T > A | p.Leu295Gln |
| 2:25247721:AG:A | NA | frameshift | c.883delC | p.Leu295fs |
| 2:25247722:G:C | rs780953840 | missense | c.883C > G | p.Leu295Val |
| 2:25247722:G:GA | NA | frameshift | c.882_883insT | p.Leu295fs |
| 2:25247722:G:T | NA | missense | c.883C > A | p.Leu295Met |
| 2:25247722:GCTC | NA | frameshift | c.879_882delGGAG | p.Glu294fs |
| C:G | | | | |
| 2:25247724:T:C | NA | missense | c.881A > G | p.Glu294Gly |
| 2:25247724:TC:T | NA | frameshift | c.880delG | p.Glu294fs |
| 2:25247725:C:A | rs755769867 | stop_gained | c.880G > T | p.Glu294* |
| 2:25247725:CCCC | NA | frameshift | c.875_879delTTGG | p.Ile292fs |
| AA:C | | | G | |
| 2:25247726:C:CC | NA | inframe_indel | c.873_878dupCATT | p.Gly293_Glu294 |
| CAATG | | | GG | insIleGly |
| 2:25247727:C:A | NA | missense | c.878G > T | p.Gly293Val |
| 2:25247727:C:T | NA | missense | c.878G > A | p.Gly293Glu |
| 2:25247727:CCAA | NA | inframe_indel | c.869_877delTTGG | p.Phe290_Gly293 |
| TGCCAA:C | | | CATTG | delinsTrp |
| 2:25247728:C:A | NA | missense | c.877G > T | p.Gly293Trp |
| 2:25247728:C:CA | NA | frameshift | c.876dupT | p.Gly293fs |
| 2:25247728:C:CA | NA | frameshift | c.856- | p.Gly293fs |
| ATGCCAAAGCCCC | | | 20_876dupTCTGCT | |
| GGCCGTCCTGGA | | | CCTTGGGGCTCCAG | |
| GCCCCAAGGAGC | | | GACGGCCGGGGCT | |
| AGA | | | TTGGCATT | |
| 2:25247728:C:G | NA | missense | c.877G > C | p.Gly293Arg |
| 2:25247728:C:T | NA | missense | c.877G > A | p.Gly293Arg |
| 2:25247728:CA:C | rs1271476754 | frameshift | c.876delT | p.Ile292fs |
| 2:25247730:A:G | rs777306476 | missense | c.875T > C | p.Ile292Thr |
| 2:25247730:AT:A | NA | frameshift | c.874delA | p.Ile292fs |
| 2:25247730:ATG: | NA | frameshift | c.873_874delCA | p.Ile292fs |
| A | | | | |
| 2:25247734:CA:C | NA | frameshift | c.870delT | p.Phe290fs |
| 2:25247735:A:AC | NA | frameshift | c.869_870insG | p.Phe290fs |
| 2:25247736:A:AA | NA | frameshift | c.856- | p.Phe290fs |
| GCCCCGGCCGTCC | | | 4_868dupCCAGGA | |
| TGG | | | CGGCCGGGGCT | |
| 2:25247736:A:C | NA | missense | c.869T > G | p.Phe290Cys |
| 2:25247736:A:G | NA | missense | c.869T > C | p.Phe290Ser |
| 2:25247737:A:C | NA | missense | c.868T > G | p.Phe290Val |
| 2:25247737:A:T | NA | missense | c.868T > A | p.Phe290Ile |
| 2:25247737:AG:A | rs746332586 | frameshift | c.867delC | p.Phe290fs |
| 2:25247738:G:GC | NA | frameshift | c.866dupG | p.Phe290fs |
| 2:25247738:GC:G | NA | frameshift | c.866delG | p.Gly289fs |
| 2:25247738:GCC: | NA | frameshift | c.865_866delGG | p.Gly289fs |
| G | | | | |
| 2:25247741:C:CA | NA | frameshift | c.863_864insT | p.Phe290fs |
| 2:25247742:CGG: | NA | frameshift | c.861_862delCC | p.Arg288fs |
| C | | | | |
| 2:25247743:GGC | NA | splice_acceptor | c.856- | p.Asp286_Arg288 |
| CGTCCTGGA:G | | | 5_861delTCCAGGA | del |
| | | | CGGC | |
| 2:25247744:GC:G | NA | frameshift | c.860delG | p.Gly287fs |
| 2:25247746:CG:C | NA | frameshift | c.858delC | p.Asp286fs |
| 2:25247748:TC:T | NA | frameshift | c.856delG | p.Asp286fs |
| 2:25247749:C:CC | NA | splice_acceptor | c.856-4_856- | |
| TGG | | | 1dupCCAG | |
| 2:25247750:C:A | rs1179790183 | splice_acceptor | c.856-1G > T | |
| 2:25247750:C:G | NA | splice_acceptor | c.856-1G > C | |
| 2:25247750:C:T | rs1179790183 | splice_acceptor | c.856-1G > A | |
| 2:25247750:CTGG | NA | splice_acceptor | c.856-5_856- | |
| A:C | | | 2delTCCA | |
| 2:25247751:T:A | NA | splice_acceptor | c.856-2A > T | |
| 2:25247751:T:C | rs1234716262 | splice_acceptor | c.856-2A > G | |
| 2:25247751:T:G | rs1234716262 | splice_acceptor | c.856-2A > C | |
| 2:25248034:CACC | NA | frameshift | c.851_855+2delAC | p.Tyr284fs |
| TCGT:C | | | GAGGT | |
| 2:25248035:A:C | NA | splice_donor | c.855+2T > G | |
| 2:25248035:A:G | rs745824601 | splice_donor | c.855+2T > C | |
| 2:25248035:AC:A | NA | splice_donor | c.855+1delG | |
| 2:25248036:C:A | rs772041639 | splice_donor | c.855+1G > T | |
| 2:25248036:C:G | NA | splice_donor | c.855+1G > C | |
| 2:25248036:C:T | rs772041639 | splice_donor | c.855+1G > A | |
| 2:25248037:CT:C | NA | frameshift | c.854delA | p.Glu285fs |
| 2:25248039:C:A | rs201882909 | stop_gained | c.853G > T | p.Glu285* |
| 2:25248039:CG:C | NA | frameshift | c.852delC | p.Tyr284fs |
| 2:25248040:G:C | NA | stop_gained | c.852C > G | p.Tyr284* |
| 2:25248040:G:T | NA | stop_gained | c.852C > A | p.Tyr284* |
| 2:25248040:GT:G | NA | frameshift | c.851delA | p.Tyr284fs |
| 2:25248041:TA:T | NA | frameshift | c.850delT | p.Tyr284fs |
| 2:25248041:TAC: | NA | frameshift | c.849_850delGT | p.Tyr284fs |
| T | | | | |
| 2:25248042:A:AC | NA | frameshift | c.842_849dupAGC | p.Tyr284fs |
| TCTGGCT | | | CAGAG | |
| 2:25248044:T:TCT | NA | frameshift | c.834_847dupCGA | p.Glu283fs |
| GGCTCGTCATCG | | | TGACGAGCCAG | |
| 2:25248044:TC:T | NA | frameshift | c.847delG | p.Glu283fs |
| 2:25248045:C:A | NA | stop_gained | c.847G > T | p.Glu283* |
| 2:25248045:C:CC | NA | frameshift | c.846_847insTG | p.Glu283fs |
| A | | | | |
| 2:25248045:C:CT | rs747075883 | frameshift | c.846dupA | p.Glu283fs |
| 2:25248049:C:CT | NA | frameshift | c.839_842dupACG | p.Pro282fs |
| CGT | | | A | |
| 2:25248050:TC:T | NA | frameshift | c.841delG | p.Glu281fs |
| 2:25248051:C:A | rs773312511 | stop_gained | c.841G > T | p.Glu281* |
| 2:25248051:CG:C | NA | frameshift | c.840delC | p.Asp280fs |
| 2:25248052:GT:G | NA | frameshift | c.839delA | p.Asp280fs |
| 2:25248053:TCAT | NA | frameshift | c.811_838delGACA | p.Asp271fs |
| CGCCTGCTTTGGT | | | AGAATGCCACCAAA | |
| GGCATTCTTGTC:T | | | GCAGGCGATG | |
| 2:25248056:TC:T | NA | frameshift | c.835delG | p.Asp279fs |
| 2:25248062:GCTT | NA | frameshift | c.817_829delAATG | p.Asn273fs |
| TGGTGGCATT:G | | | CCACCAAAG | |
| 2:25248063:C:CT | NA | frameshift | c.828dupA | p.Ala277fs |
| 2:25248063:CT:C | NA | frameshift | c.828delA | p.Ala277fs |
| 2:25248063:CTTT | NA | frameshift | c.824_828delCCAA | p.Thr275fs |
| GG:C | | | A | |
| 2:25248066:T:A | NA | stop_gained | c.826A > T | p.Lys276* |
| 2:25248066:TG:T | NA | frameshift | c.825delC | p.Ala277fs |
| 2:25248068:G:GT | NA | frameshift | c.816_823dupGAA | p.Thr275fs |
| GGCATTC | | | TGCCA | |
| 2:25248068:GT:G | NA | frameshift | c.823delA | p.Thr275fs |
| 2:25248069:T:TG | NA | frameshift | c.797_822dupGGT | p.Thr275fs |
| GCATTCTTGTCCC | | | CCGATGCTGGGGA | |
| CAGCATCGGACC | | | CAAGAATGCC | |
| 2:25248069:TG:T | NA | frameshift | c.822delC | p.Thr275fs |
| 2:25248071:GC:G | NA | frameshift | c.820delG | p.Ala274fs |
| 2:25248072:CA:C | NA | frameshift | c.819delT | p.Asn273fs |
| 2:25248073:AT:A | NA | frameshift | c.818delA | p.Asn273fs |
| 2:25248075:TC:T | NA | frameshift | c.816delG | p.Asn273fs |
| 2:25248076:CT:C | NA | frameshift | c.815delA | p.Lys272fs |
| 2:25248078:T:A | NA | stop_gained | c.814A > T | p.Lys272* |
| 2:25248079:GT:G | NA | frameshift | c.812delA | p.Asp271fs |
| 2:25248080:T:TC | NA | frameshift | c.811dupG | p.Asp271fs |
| 2:25248080:TC:T | NA | frameshift | c.811delG | p.Asp271fs |
| 2:25248080:TCCC | NA | frameshift | c.799_811delTCCG | p.Ser267fs |
| CAGCATCGGA:T | | | ATGCTGGGG | |
| 2:25248083:CCAG | NA | frameshift | c.784_808delCCTG | p.Pro262fs |
| CATCGGACCCCAC | | | AGCCCGTGGGGTCC | |
| GGGCTCAGG:C | | | GATGCTG | |
| 2:25248085:AG:A | NA | frameshift | c.806delC | p.Ala269fs |
| 2:25248085:AGC | NA | frameshift | c.785_806delCTGA | p.Pro262fs |
| ATCGGACCCCACG | | | GCCCGTGGGGTCC | |
| GGCTCAG:A | | | GATGC | |
| 2:25248086:G:GC | NA | frameshift | c.805dupG | p.Ala269fs |
| 2:25248087:C:CA | NA | frameshift | c.804dupT | p.Ala269fs |
| 2:25248087:C:CT | NA | frameshift | c.804_805insA | p.Ala269fs |
| 2:25248088:ATC: | NA | frameshift | c.802_803delGA | p.Asp268fs |
| A | | | | |
| 2:25248088:ATCG | NA | frameshift | c.796_803delGGGT | p.Gly266fs |
| GACCC:A | | | CCGA | |
| 2:25248089:T:TC | NA | frameshift | c.802dupG | p.Asp268fs |
| 2:25248090:C:CG | NA | frameshift | c.801dupC | p.Asp268fs |
| 2:25248090:CG:C | NA | frameshift | c.801delC | p.Asp268fs |
| 2:25248092:G:GA | NA | frameshift | c.799dupT | p.Ser267fs |
| 2:25248092:GA:G | NA | frameshift | c.799delT | p.Ser267fs |
| 2:25248092:GAC: | NA | frameshift | c.798_799delGT | p.Ser267fs |
| G | | | | |
| 2:25248092:GACC | NA | frameshift | c.795_799delGGGG | p.Gly266fs |
| CCG | | | T | |
| 2:25248093:A:AC | NA | frameshift | c.798dupG | p.Ser267fs |
| 2:25248093:AC:A | NA | frameshift | c.798delG | p.Ser267fs |
| 2:25248096:CCAC | NA | frameshift | c.788_795delAGCC | p.Glu263fs |
| GGGCT:C | | | CGTG | |
| 2:25248098:AC:A | NA | frameshift | c.793delG | p.Va1265fs |
| 2:25248098:ACG | NA | frameshift | c.789_793delGCCC | p.Glu263fs |
| GGC:A | | | G | |
| 2:25248098:ACG | NA | frameshift | c.784_793delCCTG | p.Pro262fs |
| GGCTCAGG:A | | | AGCCCG | |
| 2:25248099:CG:C | NA | frameshift | c.792delC | p.Va1265fs |
| 2:25248099:CGG | NA | frameshift | c.785_792delCTGA | p.Pro262fs |
| GCTCAG:C | | | GCCC | |
| 2:25248100:G:GT | NA | frameshift | c.791_792insA | p.Va1265fs |
| 2:25248102:G:GC | NA | frameshift | c.788_789dupAG | p.Pro264fs |
| T | | | | |
| 2:25248102:GC:G | NA | frameshift | c.789delG | p.Glu263fs |
| 2:25248103:C:CT | NA | frameshift | c.776_788dupCTAC | p.Glu263fs |
| CAGGCGTGGTAG | | | CACGCCTGA | |
| 2:25248103:CT:C | NA | frameshift | c.788delA | p.Glu263fs |
| 2:25248104:TC:T | NA | frameshift | c.787delG | p.Glu263fs |
| 2:25248105:C:A | NA | stop_gained | c.787G > T | p.Glu263* |
| 2:25248105:CAG: | NA | frameshift | c.785_786delCT | p.Pro262fs |
| C | | | | |
| 2:25248106:AG:A | NA | frameshift | c.785delC | p.Pro262fs |
| 2:25248110:G:GT | NA | frameshift | c.781dupA | p.Thr261fs |
| 2:25248110:GT:G | NA | frameshift | c.781delA | p.Thr261fs |
| 2:25248111:T:TG | NA | frameshift | c.780dupC | p.Thr261fs |
| 2:25248111:TG:T | NA | frameshift | c.780delC | p.Thr261fs |
| 2:25248111:TGGT | NA | frameshift | c.777_780delTACC | p.Thr260fs |
| A:T | | | | |
| 2:25248113:GT:G | NA | frameshift | c.778delA | p.Thr260fs |
| 2:25248113:GTA: | NA | frameshift | c.777_778delTA | p.Thr260fs |
| G | | | | |
| 2:25248116:G:GC | NA | frameshift | c.775dupG | p.Ala259fs |
| 2:25248116:GC:G | NA | frameshift | c.775delG | p.Ala259fs |
| 2:25248117:C:CTT | NA | stop_gained | c.774_775insTAA | p.Val258_Ala259 |
| A | | | | insTer |
| 2:25248117:CCA: | NA | frameshift | c.773_774delTG | p.Val258fs |
| C | | | | |
| 2:25248118:CA:C | NA | frameshift | c.773delT | p.Val258fs |
| 2:25248119:AC:A | NA | frameshift | c.772delG | p.Val258fs |
| 2:25248120:CA:C | NA | frameshift | c.771delT | p.Val258fs |
| 2:25248120:CAGT | NA | frameshift | c.768_771delCACT | p.Thr257fs |
| G:C | | | | |
| 2:25248120:CAGT | NA | frameshift | c.761_771delCATC | p.Ala254fs |
| GGGGGATG:C | | | CCCCACT | |
| 2:25248121:A:AC | NA | frameshift | c.770_771insGG | p.Ala259fs |
| C | | | | |
| 2:25248121:A:AG | NA | frameshift | c.769_770dupAC | p.Val258fs |
| T | | | | |
| 2:25248121:AG:A | NA | frameshift | c.770delC | p.Thr257fs |
| 2:25248121:AGT: | NA | frameshift | c.769_770delAC | p.Thr257fs |
| A | | | | |
| 2:25248121:AGT | NA | frameshift | c.767_770delCCAC | p.Pro256fs |
| GG:A | | | | |
| 2:25248121:AGT | NA | frameshift | c.764_770delCCCC | p.Ser255fs |
| GGGGG:A | | | CAC | |
| 2:25248122:GT:G | NA | frameshift | c.769delA | p.Thr257fs |
| 2:25248122:GTG | NA | frameshift | c.763_769delTCCC | p.Ser255fs |
| GGGGA:G | | | CCA | |
| 2:25248123:T:TG | NA | frameshift | c.768dupC | p.Thr257fs |
| 2:25248123:TG:T | rs776931901 | frameshift | c.768delC | p.Thr257fs |
| 2:25248128:G:GC | NA | frameshift | c.763_764insG | p.Ser255fs |
| 2:25248129:ATGC | NA | frameshift | c.752_762delCTGA | p.Thr251fs |
| GGGGTCAG:A | | | CCCCGCA | |
| 2:25248130:TG:T | NA | frameshift | c.761delC | p.Ala254fs |
| 2:25248132:C:CG | NA | frameshift | c.759dupC | p.Ala254fs |
| 2:25248132:C:CG | NA | frameshift | c.758_759dupCC | p.Ala254fs |
| G | | | | |
| 2:25248132:CG:C | NA | frameshift | c.759delC | p.Ala254fs |
| 2:25248132:CGG | NA | frameshift | c.725_759delCCAG | p.Ala242fs |
| GGTCAGTGGGCT | | | CCCTCCTGCTGTGC | |
| GCTGCACAGCAG | | | AGCAGCCCACTGAC | |
| GAGGGCTGG:C | | | CCC | |
| 2:25248136:GT:G | NA | frameshift | c.755delA | p.Asp252fs |
| 2:25248138:C:CA | NA | frameshift | c.753dupT | p.Asp252fs |
| 2:25248139:AG:A | NA | frameshift | c.752delC | p.Thr251fs |
| 2:25248140:GT:G | NA | frameshift | c.751delA | p.Thr251fs |
| 2:25248141:TG:T | rs749072422 | frameshift | c.750delC | p.Thr251fs |
| 2:25248141:TGG | NA | frameshift | c.738_750delTGTG | p.Val247fs |
| GCTGCTGCACA:T | | | CAGCAGCCC | |
| 2:25248141:TGG | NA | frameshift | c.731_750delCTCC | p.Pro244fs |
| GCTGCTGCACAGC | | | TGCTGTGCAGCAGC | |
| AGGAG:T | | | CC | |
| 2:25248145:CT:C | NA | frameshift | c.746delA | p.Gln249fs |
| 2:25248146:TG:T | NA | frameshift | c.745delC | p.Gln249fs |
| 2:25248146:TGCT | NA | frameshift | c.730_745delCCTC | p.Pro244fs |
| GCACAGCAGGAG | | | CTGCTGTGCAGC | |
| G:T | | | | |
| 2:25248147:G:A | rs759747476 | stop_gained | c.745C > T | p.Gln249* |
| 2:25248147:G:T | NA | missense | c.745C > A | p.Gln249Lys |
| 2:25248149:TGCA | NA | frameshift | c.738_742delTGTG | p.Val247fs |
| CA:T | | | c | |
| 2:25248149:TGCA | NA | frameshift | c.729_742delCCCT | p.Ser243fs |
| CAGCAGGAGGG:T | | | CCTGCTGTGC | |
| 2:25248149:TGCA | NA | frameshift | c.726_742delCAGC | p.Ser243fs |
| CAGCAGGAGGGC | | | CCTCCTGCTGTGC | |
| TG:T | | | | |
| 2:25248150:G:A | rs772648943 | stop_gained | c.742C > T | p.Gln248* |
| 2:25248150:G:GC | NA | frameshift | c.740_741dupTG | p.Gln248fs |
| A | | | | |
| 2:25248150:GCAC | NA | frameshift | c.716_741delTGGA | p.Val239fs |
| AGCAGGAGGGCT | | | GGAGGCCAGCCCTC | |
| GGCCTCCTCCA:G | | | CTGCTGTG | |
| 2:25248152:A:AG | NA | frameshift | c.739_740insC | p.Val247fs |
| 2:25248152:AC:A | NA | frameshift | c.739delG | p.Val247fs |
| 2:25248154:A:AG | NA | frameshift | c.737dupC | p.Val247fs |
| 2:25248154:AG:A | NA | frameshift | c.737delC | p.Ala246fs |
| 2:25248154:AGC | NA | frameshift | c.731_737delCTCC | p.Pro244fs |
| AGGAG:A | | | TGC | |
| 2:25248155:GC:G | NA | frameshift | c.736delG | p.Ala246fs |
| 2:25248156:C:CA | NA | frameshift | c.735_736insTT | p.Ala246fs |
| A | | | | |
| 2:25248156:CAG | NA | frameshift | c.725_735delCCAG | p.Ala242fs |
| GAGGGCTGG:C | | | CCCTCCT | |
| 2:25248156:CAG | NA | frameshift | c.719_735delAGGA | p.Glu240fs |
| GAGGGCTGGCCT | | | GGCCAGCCCTCCT | |
| CCT:C | | | | |
| 2:25248157:AG:A | rs1467732928 | frameshift | c.734delC | p.Pro245fs |
| 2:25248157:AGG | NA | frameshift | c.730_734delCCTC | p.Pro244fs |
| AGG:A | | | C | |
| 2:25248157:AGG | NA | frameshift | c.719_734delAGGA | p.Glu240fs |
| AGGGCTGGCCTCC | | | GGCCAGCCCTCC | |
| T:A | | | | |
| 2:25248158:G:GA | NA | frameshift | c.733_734insT | p.Pro245fs |
| 2:25248160:A:AG | NA | frameshift | c.731dupC | p.Pro245fs |
| 2:25248160:A:AG | NA | frameshift | c.728_731dupGCC | p.Ala246fs |
| GGC | | | C | |
| 2:25248160:AG:A | NA | frameshift | c.731delC | p.Pro244fs |
| 2:25248160:AGG | NA | frameshift | c.727_731delAGCC | p.Pro244fs |
| GCT:A | | | C | |
| 2:25248161:G:GG | NA | frameshift | c.702_730dupGGA | p.Pro244fs |
| GCTGGCCTCCTCC | | | GTCTCAGAAGGTG | |
| ACCTTCTGAGACT | | | GAGGAGGCCAGCC | |
| CC | | | | |
| 2:25248161:GGG | rs767439400 | frameshift | c.727_730delAGCC | p.Ser243fs |
| CT:G | | | | |
| 2:25248162:G:GA | NA | frameshift | c.729_730insAGGA | p.Pro244fs |
| GGCCAGCCCTCCT | | | GGGCTGGCCT | |
| 2:25248162:GGC: | NA | frameshift | c.728_729delGC | p.Ser243fs |
| G | | | | |
| 2:25248163:G:GC | NA | frameshift | c.704_728dupAGT | p.Ser243fs |
| TGGCCTCCTCCAC | | | CTCAGAAGGTGGA | |
| CTTCTGAGACT | | | GGAGGCCAG | |
| 2:25248163:GC:G | NA | frameshift | c.728delG | p.Ser243fs |
| 2:25248163:GCTG | NA | frameshift | c.722_728delAGGC | p.Glu241fs |
| GCCT:G | | | CAG | |
| 2:25248163:GCTG | NA | frameshift | c.721_728delGAGG | p.Glu241fs |
| GCCTC:G | | | CCAG | |
| 2:25248164:CT:C | NA | frameshift | c.727delA | p.Ser243fs |
| 2:25248165:T:TG | NA | frameshift | c.726dupC | p.Ser243fs |
| 2:25248165:TG:T | NA | frameshift | c.726delC | p.Ser243fs |
| 2:25248166:GGC | NA | frameshift | c.721_725delGAGG | p.Glu241fs |
| CTC:G | | | C | |
| 2:25248166:GGC | NA | frameshift | c.718_725delGAGG | p.Glu240fs |
| CTCCTCG | | | AGGC | |
| 2:25248167:G:GA | NA | frameshift | c.724_725insGCTG | p.Ala242fs |
| GGAGGCCAGC | | | GCCTCCT | |
| 2:25248167:G:GA | NA | frameshift | c.724_725insGCTG | p.Ala242fs |
| GTAGGCCAGC | | | GCCTACT | |
| 2:25248167:G:GC | NA | frameshift | c.682_724dupGAA | p.Ala242fs |
| CTCCTCCACCTTCT | | | GAAAACCAGGGGC | |
| GAGACTCCCCGG | | | CCGGGGAGTCTCA | |
| GCCCCTGGTTTTC | | | GAAGGTGGAGGAG | |
| TTC | | | G | |
| 2:25248167:GC:G | NA | frameshift | c.724delG | p.Ala242fs |
| 2:25248167:GCC: | NA | frameshift | c.723_724delGG | p.Glu241fs |
| G | | | | |
| 2:25248167:GCCT | NA | frameshift | c.718_724delGAGG | p.Glu240fs |
| CCTC:G | | | AGG | |
| 2:25248169:C:CA | NA | frameshift | c.722_723insTCCT | p.Glu241fs |
| GGA | | | | |
| 2:25248171:C:A | NA | stop_gained | c.721G > T | p.Glu241* |
| 2:25248171:CCT: | NA | frameshift | c.719_720delAG | p.Glu240fs |
| C | | | | |
| 2:25248174:C:A | NA | stop_gained | c.718G > T | p.Glu240* |
| 2:25248175:CACC | NA | frameshift | c.707_716delCTCA | p.Ser236fs |
| TTCTGAG:C | | | GAAGGT | |
| 2:25248176:A:AC | NA | frameshift | c.711_715dupGAA | p.Val239fs |
| CTTC | | | GG | |
| 2:25248176:AC:A | NA | frameshift | c.715delG | p.Val239fs |
| 2:25248176:ACCT | NA | frameshift | c.702_715delGGAG | p.Glu235fs |
| TCTGAGACTCC:A | | | TCTCAGAAGG | |
| 2:25248178:C:CT | NA | frameshift | c.713dupA | p.Val239fs |
| 2:25248178:CT:C | NA | frameshift | c.713delA | p.Lys238fs |
| 2:25248179:TTC:T | NA | frameshift | c.711_712delGA | p.Lys238fs |
| 2:25248179:TTCT | NA | frameshift | c.705_712delGTCT | p.Ser236fs |
| GAGAC:T | | | CAGA | |
| 2:25248180:T:A | NA | stop_gained | c.712A > T | p.Lys238* |
| 2:25248180:TC:T | NA | frameshift | c.711delG | p.Lys238fs |
| 2:25248183:G:A | NA | stop_gained | c.709C > T | p.Gln237* |
| 2:25248183:G:GA | NA | frameshift | c.708dupT | p.Gln237fs |
| 2:25248183:GA:G | NA | frameshift | c.708delT | p.Gln237fs |
| 2:25248183:GAG | NA | frameshift | c.683_708delAAGA | p.Glu228fs |
| ACTCCCCGGGCCC | | | AAACCAGGGGCCC | |
| CTGGTTTTCTTTG | | | GGGGAGTCT | |
| 2:25248186:AC:A | NA | frameshift | c.705delG | p.Glu235fs |
| 2:25248187:C:CT | NA | frameshift | c.704dupA | p.Ser236fs |
| 2:25248187:CT:C | NA | frameshift | c.704delA | p.Glu235fs |
| 2:25248188:T:TC | rs1301352218 | frameshift | c.703dupG | p.Glu235fs |
| 2:25248188:TC:T | NA | frameshift | c.703delG | p.Glu235fs |
| 2:25248189:C:A | NA | stop_gained | c.703G > T | p.Glu235* |
| 2:25248191:C:CT | NA | frameshift | c.700_701insA | p.Gly234fs |
| 2:25248192:C:CG | NA | frameshift | c.699dupC | p.Gly234fs |
| 2:25248192:C:CG | NA | frameshift | c.698_699dupCC | p.Gly234fs |
| G | | | | |
| 2:25248192:CG:C | | frameshift | c.699delC | p.Glu235fs |
| 2:25248195:G:GC | NA | frameshift | c.696dupG | p.Pro233fs |
| 2:25248195:G:GC | NA | frameshift | c.689_696dupACC | p.Pro233fs |
| CCCTGGT | | | AGGGG | |
| 2:25248195:GC:G | rs763740173 | frameshift | c.696delG | p.Glu235fs |
| 2:25248195:GCC: | NA | frameshift | c.695_696delGG | p.Gly232fs |
| G | | | | |
| 2:25248196:C:CG | NA | frameshift | c.695_696insC | p.Pro233fs |
| 2:25248199:CT:C | | frameshift | c.692delA | p.Gln231fs |
| 2:25248200:T:TG | NA | frameshift | c.691dupC | p.Gln231fs |
| 2:25248200:T:TG | NA | frameshift | c.691_692insGGGG | p.Gln231fs |
| GTTTTCTTCCCCC | | | GAAGAAAACC | |
| 2:25248200:TG:T | NA | frameshift | c.691delC | p.Gln231fs |
| 2:25248201:G:A | NA | stop_gained | c.691C > T | p.Gln231* |
| 2:25248202:GT:G | NA | frameshift | c.689delA | p.Asn230fs |
| 2:25248203:TTTT | NA | frameshift | c.685_688delGAAA | p.Glu229fs |
| C:T | | | | |
| 2:25248206:TC:T | NA | frameshift | c.685delG | p.Glu229fs |
| 2:25248207:C:A | NA | stop_gained | c.685G > T | p.Glu229* |
| 2:25248207:CT:C | NA | frameshift | c.684delA | p.Glu229fs |
| 2:25248209:TC:T | NA | frameshift | c.682delG | p.Glu228fs |
| 2:25248210:C:A | NA | stop_gained | c.682G > T | p.Glu228* |
| 2:25248211:CA:C | NA | frameshift | c.680delT | p.Val227fs |
| 2:25248213:C:CA | NA | frameshift | c.675_678dupTGCT | p.Val227fs |
| GCA | | | | |
| 2:25248213:CA:C | NA | frameshift | c.678delT | p.Val227fs |
| 2:25248214:AG:A | NA | frameshift | c.677delC | p.Ala226fs |
| 2:25248215:G:GC | NA | frameshift | c.676dupG | p.Ala226fs |
| 2:25248215:GC:G | NA | frameshift | c.676delG | p.Ala226fs |
| 2:25248216:C:CA | NA | frameshift | c.675dupT | p.Ala226fs |
| 2:25248216:CA:C | NA | frameshift | c.675delT | p.Asn225fs |
| 2:25248217:AT:A | rs1306866372 | frameshift | c.674delA | p.Asn225fs |
| 2:25248219:TC:T | NA | frameshift | c.672delG | p.Met224fs |
| 2:25248220:CA:C | NA | frameshift | c.671delT | p.Met224fs |
| 2:25248221:ATTC | NA | frameshift | c.667_670delGGAA | p.Gly223fs |
| C:A | | | | |
| 2:25274943:C:A | NA | stop_gained | c.637G > T | p.Glu213* |
| 2:25274945:CT:C | NA | frameshift | c.634delA | p.Arg212fs |
| 2:25274950:C:T | NA | stop_gained | c.630G > A | p.Trp210* |
| 2:25274951:C:T | NA | stop_gained | c.629G > A | p.Trp210* |
| 2:25274988:T:TG | NA | frameshift | c.542_591dupGTC | p.Ile198fs |
| TAGTAGGGGTCCC | | | AGCGGCCCATGCCG | |
| CCGCCTGGAAGG | | | AGGCTCACCTTCCA | |
| TGAGCCTCGGCAT | | | GGCGGGGGACCCC | |
| GGGCCGCTGAC | | | TACTAC | |
| 2:25275009:G:A | NA | stop_gained | c.571C > T | p.Gln191* |
| 2:25275010:GAA | NA | frameshift | c.563_569delTCAC | p.Leu188fs |
| GGTGA:G | | | CTT | |
| 2:25275021:T:TCC | NA | frameshift | c.558_559insCTGA | p.Arg187fs |
| GTCAG | | | CGG | |
| 2:25275022:C:CG | NA | frameshift | c.557dupC | p.Arg187fs |
| 2:25275036:G:A | NA | stop_gained | c.544C > T | p.Gln182* |
| 2:25275050:TC:T | NA | frameshift | c.529delG | p.Glu177fs |
| 2:25275056:CCCA | NA | frameshift | c.516_523delTGGC | p.Gly173fs |
| AGCCA:C | | | TTGG | |
| 2:25275064:A:AC | NA | frameshift | c.515dupG | p.Gly173fs |
| 2:25275069:G:GT | NA | frameshift | c.510_511insA | p.Arg171fs |
| 2:25275074:CG:C | rs1458590320 | frameshift | c.505delC | p.Arg169fs |
| 2:25275076:GC:G | NA | frameshift | c.503delG | p.Gly168fs |
| 2:25275498:G:C | NA | splice_donor | c.492+2C > G | |
| 2:25275512:G:GG | NA | frameshift | c.472_479dupATC | p.Met161fs |
| ATTCGAT | | | GAATC | |
| 2:25275541:T:A | NA | stop_gained | c.451A > T | p.Lys151* |
| 2:25275545:T:C | NA | splice_acceptor | c.449-2A > G | |
| 2:25282440:C:T | NA | splice_donor | c.448+1G > A | |
| 2:25282461:CG:C | NA | frameshift | c.427delC | p.Arg143fs |
| 2:25282462:G:A | rs1352259738 | stop_gained | c.427C > T | p.Arg143* |
| 2:25282463:GCG | NA | frameshift | c.425delG | p.Gly142fs |
| 2:25282486:CA:C | NA | frameshift | c.402delT | p.Asn134fs |
| 2:25282487:AT:A | NA | frameshift | c.401delA | p.Asn134fs |
| 2:25282503:G:T | NA | stop_gained | c.386C > A | p.Ser129* |
| 2:25282538:CT:C | NA | frameshift | c.350delA | p.Glu117fs |
| 2:25282544:T:TG | NA | frameshift | c.344_345insTCTG | p.Ala116fs |
| GGGGGCAGAAGG | | | CTGGGGCCCCGCCC | |
| GCGGGGCCCCAG | | | TTCTGCCCCCC | |
| CAGA | | | | |
| 2:25282544:TG:T | NA | frameshift | c.344delC | p.Pro115fs |
| 2:25282548:GCCC | NA | frameshift | c.337_340delGGGG | p.Gly113fs |
| C:G | | | | |
| 2:25282551:C:CA | NA | frameshift | c.337_338insCCCTT | p.Gly113fs |
| GAAGGG | | | CT | |
| 2:25282561:GC:G | NA | frameshift | c.327delG | p.Gln110fs |
| 2:25282576:TC:T | NA | frameshift | c.312delG | p.Ser105fs |
| 2:25282584:T:TG | NA | frameshift | c.304_305insC | p.Glu102fs |
| 2:25282590:TG:T | NA | frameshift | c.298delC | p.Gln100fs |
| 2:25282591:G:A | NA | stop_gained | c.298C > T | p.Gln100* |
| 2:25282597:C:A | NA | stop_gained | c.292G > T | p.Glu98* |
| 2:25282610:CA:C | NA | frameshift | c.278delT | p.Leu93fs |
| 2:25282634:TG:T | NA | frameshift | c.254delC | p.Ser85fs |
| 2:25282635:G:C | NA | stop_gained | c.254C > G | p.Ser85* |
| 2:25282642:CTGA | NA | frameshift | c.230_246delCCAT | p.Ser77fs |
| GTCCTGGGCCATG | | | GGCCCAGGACTCA | |
| G:C | | | | |
| 2:25282644:G:C | NA | stop_gained | c.245C > G | p.Ser82* |
| 2:25282649:C:CC | NA | frameshift | c.239_240insTGGA | p.Gln80fs |
| CATCCA | | | TGG | |
| 2:25282651:G:A | NA | stop_gained | c.238C > T | p.Gln80* |
| 2:25282661:TG:T | NA | frameshift | c.227delC | p.Pro76fs |
| 2:25282682:AGG: | NA | frameshift | c.205_206delCC | p.Pro69fs |
| A | | | | |
| 2:25282690:T:A | NA | stop_gained | c.199A > T | p.Lys67* |
| 2:25300139:C:CG | rs769876640 | frameshift | c.176dupC | p.Val60fs |
| 2:25300231:G:A | NA | stop_gained | c.85C > T | p.Gln29* |
| 2:25313912:C:T | NA | splice_donor | c.72+1G > A | |
| 2:25313936:C:CA | NA | frameshift | c.48_49insACGCAG | p.Ala17fs |
| GCTCTGCTGCGT | | | CAGAGCT | |
| 2:25313941:G:GC | NA | stop_gained | c.43_44insGAG | p.Ser15delinsTer |
| TC | | | | Ala |
| 2:25313949:G:GC | NA | frameshift | c.35_36insTCCTCCC | p.Ser13fs |
| GGAGCGGGAGGA | | | GCTCCG | |
| 2:25313949:G:GC | NA | frameshift | c.35_36insGCCCGC | p.Ser13fs |
| GGAGCGGGC | | | TCCG | |
| 2:25313953:TC:T | rs1213222712 | frameshift | c.31delG | p.Asp11fs |
| 2:25313957:C:CG | NA | frameshift | c.27dupC | p.Gly10fs |
| 2:25313957:CG:C | NA | frameshift | c.27delC | p.Asp11fs |
| 2:25313968:GA:G | NA | frameshift | c.16delT | p.Ser6fs |
| 2:25313976:G:GC | NA | frameshift | c.8_9insTGGAGGG | p.Met4fs |
| CCTCCA | | | | |
| 2:25314163:T:A | NA | splice_acceptor | c.-177-2A > T | |
| 2:25314163:T:G | NA | splice_acceptor | c.-177-2A > C | |

[0206] Representative ASXL1 somatic mutations include:

| | | | | |
|---|---|---|---|---|
| 20:32366382:A:G | NA | splice_acceptor | c.58-2A > G | |
| 20:32369013:A:G | NA | splice_acceptor | c.144-2A > G | |
| 20:32429899:A:G | NA | splice_acceptor | c.566-2A > G | |
| 20:32431680:G:A | NA | splice_donor | c.979+1G > A | |
| 20:32432900:C:T | NA | stop_gained | c.1000 > T | p.Gln334* |
| 20:32432930:GA:G | NA | frameshift | c.1034delA | p.Lys345fs |
| 20:32432978:G:T | NA | stop_gained | c.1078G > T | p.Gly360* |
| 20:32432981:C:T | NA | stop_gained | c.1081 > T | p.Gln361* |
| 20:32432986:G:A | NA | splice_donor | c.1085+1G > A | |
| 20:32433283:G:A | NA | splice_acceptor | c.1086-1G > A | |
| 20:32433283:G:C | NA | splice_acceptor | c.1086-1G > C | |
| 20:32433283:G:T | rs777661872 | splice_acceptor | c.1086-1G > T | |
| 20:32433297:A:T | NA | stop_gained | c.1099A > T | p.Lys367* |
| 20:32433310:T:A | NA | stop_gained | c.1112T > A | p.Leu371* |
| 20:32433312:C:T | rs199846284 | stop_gained | c.1114 > T | p.Gln372* |
| 20:32433315:C:T | rs1427299519 | stop_gained | c.1117 > T | p.Gln373* |
| 20:32433322:TG:T | NA | frameshift | c.1127delG | p.Gly376fs |
| 20:32433327:C:T | rs1386196069 | stop_gained | c.1129 > T | p.Gln377* |
| 20:32433330:G:T | NA | stop_gained | c.1132G > T | p.Glu378* |
| 20:32433333:G:GA | NA | frameshift | c.1136dupA | p.Ala380fs |
| 20:32433333:G:T | NA | stop_gained | c.1135G > T | p.Glu379* |
| 20:32433339:G:T | NA | stop_gained | c.1141G > T | p.Glu381* |
| 20:32433344:CAAAAGT | NA | frameshift | c.1147_1163 | p.Lys383fs |
| GGCTTGTGTGT:C | | | delAAAAGTG | |
| | | | GCTTGTGTG | |
| | | | T | |
| 20:32433345:A:T | NA | stop_gained | c.1147A > T | p.Lys383* |
| 20:32433354:TTG:T | rs886043994 | frameshift | c.1162_1163 | p.Va1388fs |
| | | | delGT | |
| 20:32433355:T:A | rs772584710 | stop_gained | c.1157T > A | p.Leu386* |
| 20:32433355:TGTGTG:T | NA | frameshift | c.1158_1162 | p.Leu386fs |
| | | | delGTGTG | |
| 20:32433356:G:GT | NA | frameshift | c.1159dupT | p.Cys387fs |
| 20:32433359:T:A | NA | stop_gained | c.1161T > A | p.Cys387* |
| 20:32433359:T:TGTCC | NA | frameshift | c.1162_1165 | p.Pro389fs |
| | | | dupGTCC | |
| 20:32433361:T:TC | NA | frameshift | c.1166dupC | p.Gly390fs |
| 20:32433366:G:T | rs1l90212499 | stop_gained | c.1168G > T | p.Gly390* |
| 20:32433369:G:T | NA | stop_gained | c.1171G > T | p.Glu391* |
| 20:32433372:TCAGTGC | NA | frameshift | c.1178_1188 | p.Va1393fs |
| GTATA:T | | | delTGCGTAT | |
| | | | ACAG | |
| 20:32433373:C:CA | NA | frameshift | c.1176dupA | p.Va1393fs |
| 20:32433373:C:G | NA | stop_gained | c.1175 > G | p.Ser392* |
| 20:32433379:G:GT | NA | frameshift | c.1182dupT | p.Ile395fs |
| 20:32433380:T:TA | NA | frameshift | c.1183dupA | p.Ile395fs |
| 20:32433381:A:AT | NA | frameshift | c.1184dupT | p.Gln396fs |
| 20:32433384:C:T | NA | stop_gained | c.1186C > T | p.Gln396* |
| 20:32433396:G:GC | NA | frameshift | c.1200dupC | p.Thr401fs |
| 20:32433408:C:CGAGAT | NA | frameshift | c.1212_1218 | p.His407fs |
| GG | | | dupAGATGG | |
| | | | G | |
| 20:32433408:C:T | rs373145711 | stop_gained | c.1210 > T | p.Arg404* |
| 20:32433415:GGCATTTT | NA | frameshift | c.1220_1233 | p.His407fs |
| AAGAAAC:G | | | delATTTTAA | |
| | | | GAAACGC | |
| 20:32433417:CATTTTAA | NA | frameshift | c.1220_1236 | p.His407fs |
| GAAACGCTCT:C | | | delATTTTAA | |
| | | | GAAACGCTC | |
| | | | T | |
| 20:32433418:A:AT | NA | frameshift | c.1224dupT | p.Lys409fs |
| 20:32433418:ATT:A | NA | frameshift | c.1223_1224 | p.Phe408fs |
| | | | delTT | |
| 20:32433422:T:TA | NA | frameshift | c.1226dupA | p.Lys410fs |
| 20:32433423:A:T | NA | stop_gained | c.1225A > T | p.Lys409* |
| 20:32433425:G:GA | NA | frameshift | c.1230dupA | p.Arg411fs |
| 20:32433426:A:T | NA | stop_gained | c.1228A > T | p.Lys410* |
| 20:32433430:GCT:G | NA | frameshift | c.1236_1237 | p.Arg413fs |
| | | | delTC | |
| 20:32433433:C:CT | NA | frameshift | c.1236dupT | p.Arg413fs |
| 20:32433434:TCGGCCA | NA | frameshift | c.1237_1244 | p.Arg413fs |
| GA:T | | | delCGGCCAG | |
| | | | A | |
| 20:32433441:G:GA | NA | frameshift | c.1244dupA | p.Asp415fs |
| 20:32433441:GAT:G | NA | frameshift | c.1244_1245 | p.Asp415fs |
| | | | delAT | |
| 20:32433447:C:T | rs375215583 | stop_gained | c.1249delT | p.Arg417* |
| 20:32433451:CCA:C | NA | frameshift | c.1254_1255 | p.Arg419fs |
| | | | delCA | |
| 20:32433453:A:T | NA | stop_gained | c.1255A > T | p.Arg419* |
| 20:32433464:G:GA | NA | frameshift | c.1268dupA | p.Asn423fs |
| 20:32433468:CTG:C | rs1269374749 | frameshift | c.1272_1273 | p.Tyr425fs |
| | | | delGT | |
| 20:32433468:CTGTACA | NA | frameshift | c.1271_1278 | p.Leu424fs |
| AA:C | | | delTGTACAA | |
| | | | A | |
| 20:32433472:AC:A | rs755250567 | frameshift | c.1275delC | p.Tyr425fs |
| 20:32433473:C:CA | rs1187950456, | frameshift | c.1281dupA | p.Gln428fs |
| | rs886042532 | | | |
| 20:32433473:C:G | NA | stop_gained | c.1275delG | p.Tyr425* |
| 20:32433474:A:T | NA | stop_gained | c.1276A > T | p.Lys426* |
| 20:32433477:A:T | NA | stop_gained | c.1279A > T | p.Lys427* |
| 20:32433479:A:AG | NA | frameshift | c.1281_1282 | p.Gln428fs |
| | | | insG | |
| 20:32433480:C:CA | NA | frameshift | c.1283dupA | p.Glu429fs |
| 20:32433480:C:T | rs886041975 | stop_gained | c.1282delT | p.Gln428* |
| 20:32433480:CAG:C | NA | frameshift | c.1283_1284 | p.Gln428fs |
| | | | delAG | |
| 20:32433482:GGAGTCA | NA | frameshift | c.1287_1366 | p.Glu429fs |
| GAACAAGCAGGGGTTGC | | | delGTCAGAA | |
| TAAGGATGCAAAATCTG | | | CAAGCAGGG | |
| TGGCCTCAGATGTTCCCC | | | GTTGCTAAG | |
| TCTACAAGGATGGGGAG | | | GATGCAAAA | |
| GCTAA:G | | | TCTGTGGCC | |
| | | | TCAGATGTTC | |
| | | | CCCTCTACAA | |
| | | | GGATGGGGA | |
| | | | GGCTAAGA | |
| 20:32433483:G:T | NA | stop_gained | c.1285G > T | p.Glu429* |
| 20:32433486:TC:T | NA | frameshift | c.1289delC | p.Ser430fs |
| 20:32433487:C:A | NA | stop_gained | c.1289delA | p.Ser430* |
| 20:32433487:C:G | NA | stop_gained | c.1289delG | p.Ser430* |
| 20:32433489:G:T | NA | stop_gained | c.1291G > T | p.Glu431* |
| 20:32433492:C:T | rs764325672 | stop_gained | c.1294delT | p.Gln432* |
| 20:32433495:G:GC | NA | frameshift | c.1298dupC | p.Gly434fs |
| 20:32433508:AGGATGC | NA | frameshift | c.1313_1380 | p.Asp438fs |
| AAAATCTGTGGCCTCAG | | | delATGCAAA | |
| ATGTTCCCCTCTACAAGG | | | ATCTGTGGC | |
| ATGGGGAGGCTAAGACT | | | CTCAGATGTT | |
| GACCCAGCAG:A | | | CCCCTCTACA | |
| | | | AGGATGGGG | |
| | | | AGGCTAAGA | |
| | | | CTGACCCAG | |
| | | | CAGGG | |
| 20:32433528:TC:T | NA | frameshift | c.1331delC | p.Ser444fs |
| 20:32433529:C:A | rs373126831 | stop_gained | c.1331C > A | p.Ser444* |
| 20:32433529:C:G | rs373126831 | stop_gained | c.1331C > G | p.Ser444* |
| 20:32433540:C:CATCCT | NA | frameshift | c.1342_1343 | p.Leu448fs |
| TGTAGAGGGGAACA | | | insATCCTTGT | |
| | | | AGAGGGGA | |
| | | | ACA | |
| 20:32433542:C:CCCCAT | NA | frameshift | c.1344_1345 | p.Tyr449fs |
| CCTTG | | | insCCCATCCT | |
| | | | TG | |
| 20:32433544:AC:A | | frameshift | c.1347delC | p.Tyr449fs |
| 20:32433544:ACAAGGA | NA | frameshift | c.1348_1361 | p.Lys450fs |
| TGGGGAGG:A | | | delAAGGATG | |
| | | | GGGAGGC | |
| 20:32433545:C:A | NA | stop_gained | c.1347C > A | p.Tyr449* |
| 20:32433545:C:G | NA | stop_gained | c.1347C > G | p.Tyr449* |
| 20:32433551:TGG:T | NA | frameshift | c.1356_1357 | p.Glu453fs |
| | | | delGG | |
| 20:32433552:G:GTCCC | NA | frameshift | c.1354_1355 | p.Gly452fs |
| | | | insTCCC | |
| 20:32433555:G:T | NA | stop_gained | c.1357G > T | p.Glu453* |
| 20:32433556:AGGCTAA | NA | frameshift | c.1363_1382 | p.Lys455fs |
| GACTGACCCAGCAG:A | | | delAAGACTG | |
| | | | ACCCAGCAG | |
| | | | GGCT | |
| 20:32433559:C:CT | NA | frameshift | c.1362dupT | p.Lys455fs |
| 20:32433560:T:TA | NA | frameshift | c.1364dupA | p.Thr456fs |
| 20:32433561:A:T | rs1292471399 | stop_gained | c.1363A > T | p.Lys455* |
| 20:32433566:TG:T | NA | frameshift | c.1369delG | p.Asp457fs |
| 20:32433567:GACCC:G | NA | frameshift | c.1371_1374 | p.Asp457fs |
| | | | delCCCA | |
| 20:32433568:AC:A | NA | frameshift | c.1373delC | p.Pro458fs |
| 20:32433568:ACC:A | NA | frameshift | c.1372_1373 | p.Pro458fs |
| | | | delCC | |
| 20:32433572:AGCAGG: | NA | frameshift | c.1377_1381 | p.Gly460fs |
| A | | | delAGGGC | |
| 20:32433575:A:AG | NA | frameshift | c.1380dupG | p.Leu461fs |
| 20:32433578:GC:G | NA | frameshift | c.1381delC | p.Leu461fs |
| 20:32433579:C:CT | NA | frameshift | c.1382dupT | p.Ser462fs |
| 20:32433580:TGA:T | NA | frameshift | c.1384_1385 | p.Ser462fs |
| | | | delAG | |
| 20:32433583:G:GC | NA | frameshift | c.1386dupC | p.Ser463fs |
| 20:32433584:CAG:C | NA | frameshift | c.1387_1388 | p.His465fs |
| | | | delAG | |
| 20:32433593:T:TA | NA | frameshift | c.1395_1396 | p.Leu466fs |
| | | | insA | |
| 20:32433601:GCACATC | NA | frameshift | c.1405_1412 | p.Thr469fs |
| CT:G | | | delACATCCT | |
| | | | C | |
| 20:32433606:T:TC | NA | frameshift | c.1410dupC | p.Ser471fs |
| 20:32433613:CAGCACC | NA | frameshift | c.1418_1431 | p.Ala473fs |
| CGACCTGG:C | | | delCACCCGA | |
| | | | CCTGGAG | |
| 20:32433616:C:CA | NA | frameshift | c.1419dupA | p.Pro474fs |
| 20:32433620:CGACCT:C | NA | frameshift | c.1424_1428 | p.Asp475fs |
| | | | delACCTG | |
| 20:32433625:T:TG | NA | frameshift | c.1429dupG | p.Glu477fs |
| 20:32433627:G:T | rs141346625 | stop_gained | c.1429G > T | p.Glu477* |
| 20:32433636:G:T | rs545224250 | stop_gained | c.1438G > T | p.Glu480* |
| 20:32433639:TTC:T | NA | frameshift | c.1442_1443 | p.Phe481fs |
| | | | delTC | |
| 20:32433643:CAGTTG:C | NA | frameshift | c.1449_1453 | p.Glu484fs |
| | | | delTGAGT | |
| 20:32433646:T:TG | NA | frameshift | c.1448_1449 | p.Glu484fs |
| | | | insG | |
| 20:32433648:G:T | NA | stop_gained | c.1450G > T | p.Glu484* |
| 20:32433666:ATCCAGG | NA | frameshift | c.1470_1489 | p.Gln491fs |
| CTGAGCCAGACAAC:A | | | delCCAGGCT | |
| | | | GAGCCAGAC | |
| | | | AACT | |
| 20:32433669:C:T | rs1335820343 | stop_gained | c.1471C > T | p.Gln491* |
| 20:32433675:G:T | rs1434942289 | stop_gained | c.1477G > T | p.Glu493* |
| 20:32433686:C:CT | NA | frameshift | c.1490dupT | p.Leu497fs |
| 20:32433688:T:TG | NA | frameshift | c.1492dupG | p.Ala498fs |
| 20:32433693:C:CG | NA | frameshift | c.1496dupG | p.Ala500fs |
| 20:32433694:G:GT | NA | frameshift | c.1497dupT | p.Ala500fs |
| 20:32433696:G:GC | NA | frameshift | c.1500dupC | p.Ser501fs |
| 20:32433699:T:TCTGC | NA | frameshift | c.1502_1505 | p.Ser503fs |
| | | | dupCTGC | |
| 20:32433702:G:GC | NA | frameshift | c.1505dupC | p.Ser503fs |
| 20:32433703:C:CT | NA | frameshift | c.1505_1506 | p.Ser503fs |
| | | | insT | |
| 20:32433713:C:CA | NA | frameshift | c.1516dupA | p.Arg506fs |
| 20:32433713:CAG:C | rs1377319529 | frameshift | c.1517_1518 | p.Arg506fs |
| | | | delGA | |
| 20:32433714:A:T | NA | stop_gained | c.1516A > T | p.Arg506* |
| 20:32433732:C:T | rs757832294 | stop_gained | c.1534C > T | p.Gln512* |
| 20:32433734:GGAAACT | NA | frameshift | c.1538_1545 | p.Glu513fs |
| GT:G | | | delAAACTGT | |
| | | | G | |
| 20:32433735:G:GA | NA | frameshift | c.1540dupA | p.Thr514fs |
| 20:32433735:G:T | rs763708711 | stop_gained | c.1537G > T | p.Glu513* |
| 20:32433739:CTG:C | rs886041485, | frameshift | c.1544_1545 | p.Va1515fs |
| | rs777537805 | | delTG | |
| 20:32433746:T:TCAGGA | NA | frameshift | c.1550_1556 | p.Lys520fs |
| AC | | | dupAGGAAC | |
| | | | c | |
| 20:32433747:C:T | rs755464186 | stop_gained | c.1549C > T | p.Gln517* |
| 20:32433750:G:T | NA | stop_gained | c.1552G > T | p.Glu518* |
| 20:32433762:C:T | rs772017757 | stop_gained | c.1564C > T | p.Gln522* |
| 20:32433764:G:GA | NA | frameshift | c.1568dupA | p.Arg524fs |
| 20:32433765:A:T | NA | stop_gained | c.1567A > T | p.Lys523* |
| 20:32433765:AAG:A | NA | frameshift | c.1570_1571 | p.Arg524fs |
| | | | delAG | |
| 20:32433770:G:GA | NA | frameshift | c.1575dupA | p.Ser526fs |
| 20:32433774:T:TC | NA | frameshift | c.1578dupC | p.Phe527fs |
| 20:32433780:G:T | rs746873290 | stop_gained | c.1582G > T | p.Glu528* |
| 20:32433783:C:T | rs770914619 | stop_gained | c.1585C > T | p.Gln529* |
| 20:32433786:G:GC | NA | frameshift | c.1589dupC | p.Ala531fs |
| 20:32433786:G:GCGGC | NA | frameshift | c.1590_1602 | p.Phe535fs |
| CTCTGCATC | | | dupGGCCTCT | |
| | | | GCATCC | |
| 20:32433786:G:GCGGC | rs1439862866 | frameshift | c.1591_1609 | p.Glu537fs |
| CTCTGCATCCTTTCC | | | dupGCCTCTG | |
| | | | CATCCTTTCC | |
| | | | CG | |
| 20:32433787:C:CGGCCT | NA | frameshift | c.1591_1597 | p.Ala533fs |
| CT | | | dupGCCTCTG | |
| 20:32433789:G:GCCTCT | NA | frameshift | c.1592_1598 | p.Ser534fs |
| GC | | | dupCCTCTGC | |
| 20:32433790:C:CCTCTG | NA | frameshift | c.1605_1606 | p.Pro536fs |
| CATCCTTTTCTTTT | | | insTCTTTCT | |
| | | | CTGCATCCTT | |
| | | | T | |
| 20:32433791:CTCTGCAT | NA | frameshift | c.1596_1606 | p.Ala533fs |
| CCTT:C | | | delTGCATCC | |
| | | | TTTC | |
| 20:32433792:TCTGCATC | NA | frameshift | c.1596_1621 | p.Ser534fs |
| CTTTCCCGAAAAGAAGC | | | delTGCATCC | |
| CC:T | | | TTTCCCGAAA | |
| | | | AGAAGCCCC | |
| 20:32433793:C:CT | NA | frameshift | c.1596dupT | p.Ala533fs |
| 20:32433794:TGC:T | NA | frameshift | c.1597_1598 | p.Ala533fs |
| | | | delGC | |
| 20:32433800:C:CT | NA | frameshift | c.1605dupT | p.Pro536fs |
| 20:32433800:CTT:C | NA | frameshift | c.1604_1605 | p.Phe535fs |
| | | | delTT | |
| 20:32433803:T:TCCCGA | NA | frameshift | c.1610_1622 | p.Leu542fs |
| AAAGAAGC | | | dupAAAAGA | |
| | | | AGCCCCG | |
| 20:32433805:C:CCGAAA | NA | frameshift | c.1610_1634 | p.Gln546fs |
| AGAAGCCCCGGCTTGAA | | | dupAAAAGA | |
| GAT | | | AGCCCCGGC | |
| | | | TTGAAGATC | |
| | | | G | |
| 20:32433806:C:CGAAAA | NA | frameshift | c.1609_1615 | p.Lys539fs |
| GA | | | dupGAAAAG | |
| | | | A | |
| 20:32433806:CGAAAA:C | NA | frameshift | c.1612_1616 | p.Lys538fs |
| | | | delAAGAA | |
| 20:32433807:G:T | rs369425922 | stop_gained | c.1609G > T | p.Glu537* |
| 20:32433809:A:AAAGA | NA | frameshift | c.1612_1621 | p.Arg541fs |
| AGCCCC | | | dupAAGAAG | |
| | | | CCCC | |
| 20:32433811:A:AGAAG | NA | frameshift | c.1614_1617 | p.Pro540fs |
| | | | dupGAAG | |
| 20:32433812:G:GA | NA | frameshift | c.1616dupA | p.Pro540fs |
| 20:32433812:G:GAAGC | NA | frameshift | c.1615_1621 | p.Arg541fs |
| CCC | | | dupAAGCCC | |
| | | | C | |
| 20:32433812:GAA:G | rs1388881234 | frameshift | c.1615_1616 | p.Lys539fs |
| | | | delAA | |
| 20:32433813:A:T | NA | stop_gained | c.1615A > T | p.Lys539* |
| 20:32433815:G:GC | | frameshift | c.1621dupC | p.Arg541fs |
| 20:32433815:GCC:G | NA | frameshift | c.1620_1621 | p.Arg541fs |
| | | | delCC | |
| 20:32433816:C:CCCCG | NA | frameshift | c.1619_1622 | p.Leu542fs |
| | | | dupCCCG | |
| 20:32433816:CCCCGG:C | NA | frameshift | c.1620_1624 | p.Arg541fs |
| | | | delCCGGC | |
| 20:32433818:CCG:C | NA | frameshift | c.1621_1622 | p.Arg541fs |
| | | | delCG | |
| 20:32433818:CCGGCTT | NA | frameshift | c.1621_1628 | p.Leu542fs |
| GA:C | | | delCGGCTTG | |
| | | | A | |
| 20:32433819:C:CGGCTT | NA | frameshift | c.1622_1628 | p.Asp544fs |
| GA | | | dupGGCTTG | |
| | | | A | |
| 20:32433819:C:CGGCTT | NA | frameshift | c.1622_1631 | p.Asp544fs |
| GAAGA | | | dupGGCTTG | |
| | | | AAGA | |
| 20:32433823:T:TTGAAG | NA | frameshift | c.1627_1639 | p.Ser547fs |
| ATCGTCAG | | | dupGAAGAT | |
| | | | CGTCAGT | |
| 20:32433824:T:TGAAGA | rs780939938 | frameshift | c.1628_1634 | p.Gln546fs |
| TC | | | dupAAGATC | |
| | | | G | |
| 20:32433825:G:T | NA | stop_gained | c.1627G > T | p.Glu543* |
| 20:32433826:AAGATCG | NA | frameshift | c.1631_1638 | p.Asp544fs |
| TC:A | | | delATCGTCA | |
| | | | G | |
| 20:32433827:A:AGATC | NA | frameshift | c.1631_1634 | p.Gln546fs |
| | | | dupATCG | |
| 20:32433829:A:AT | NA | frameshift | c.1632dupT | p.Arg545fs |
| 20:32433829:ATCGTCA | NA | frameshift | c.1633_1643 | p.Arg545fs |
| GTCCT:A | | | delCGTCAGT | |
| | | | CCTT | |
| 20:32433830:T:TG | NA | frameshift | c.1632_1633 | p.Arg545fs |
| | | | insG | |
| 20:32433830:TCGTCA:T | NA | frameshift | c.1633_1637 | p.Arg545fs |
| | | | delCGTCA | |
| 20:32433831:C:CT | NA | frameshift | c.1633_1634 | p.Arg545fs |
| | | | insT | |
| 20:32433832:G:GT | NA | frameshift | c.1635dupT | p.Gln546fs |
| 20:32433834:C:T | rs1264792645 | stop_gained | c.1636OT | p.Gln546* |
| 20:32433837:T:TC | NA | frameshift | c.1641dupC | p.Phe548fs |
| 20:32433839:C:CT | rs745845768 | frameshift | c.1644dupT | p.Arg549fs |
| 20:32433841:T:TA | rs1211392515 | frameshift | c.1643_1644 | p.Phe548fs |
| | | | insA | |
| 20:32433844:G:GT | NA | frameshift | c.1647dupT | p.Asn550fs |
| 20:32433846:A:AACACA | NA | frameshift | c.1649_1670 | p.Glu558fs |
| ATTGAAAGTGTTCACAC | | | dupACACAA | |
| | | | TTGAAAGTG | |
| | | | TTCACAC | |
| 20:32433846:AAC:A | NA | frameshift | c.1652_1653 | p.Thr551fs |
| | | | delCA | |
| 20:32433855:G:T | NA | stop_gained | c.1657G > T | p.Glu553* |
| 20:32433879:C:T | NA | stop_gained | c.1681C > T | p.Gln561* |
| 20:32433881:G:GC | NA | frameshift | c.1686dupC | p.Thr563fs |
| 20:32433887:TAA:T | NA | frameshift | c.1691_1692 | p.Lys564fs |
| | | | delAA | |
| 20:32433900:A:T | NA | stop_gained | c.1702A > T | p.Lys568* |
| 20:32433913:TCCGGGT | NA | frameshift | c.1716_1719 | p.Arg573fs |
| A:T | | | +3delCCGGG | |
| | | | TA | |
| 20:32433918:G:A | NA | splice_donor | c.1719+1G > A | |
| 20:32433918:G:C | NA | splice_donor | c.1719+1G > C | |
| 20:32433919:T:A | NA | splice_donor | c.1719+2T > A | |
| 20:32433919:T:C | NA | splice_donor | c.1719+2T > C | |
| 20:32434429:CAGATTC | NA | splice_acceptor | c.1720- | p.Ile574_Leu576 |
| A:C | | | 1_1725delG | del |
| | | | ATTCAA | |
| 20:32434430:A:G | rs376029425 | splice_acceptor | c.1720-2A > G | |
| 20:32434430:A:T | NA | splice_acceptor | c.1720-2A > T | |
| 20:32434431:G:A | NA | splice_acceptor | c.1720-1G > A | |
| 20:32434431:G:C | NA | splice_acceptor | c.1720-1G > C | |
| 20:32434431:G:T | rs1254271466 | splice_acceptor | c.1720-1G > T | |
| 20:32434435:C:T | rs747847938 | stop_gained | c.1723C > T | p.Gln575* |
| 20:32434442:C:A | NA | stop_gained | c.1730C > A | p.Ser577* |
| 20:32434442:C:G | NA | stop_gained | c.1730C > G | p.Ser577* |
| 20:32434448:TCAAACC | NA | frameshift | c.1737_1750 | p.Lys580fs |
| ACCCTGGG:T | | | delCAAACCA | |
| | | | CCCTGGG | |
| 20:32434449:CAAACCA | NA | frameshift | c.1738_1751 | p.Lys580fs |
| CCCTGGGT:C | | | delAAACCAC | |
| | | | CCTGGGT | |
| 20:32434450:AAACCAC | NA | frameshift | c.1741_1757 | p.Pro581fs |
| CCTGGGTGGTT:A | | | delCCACCCT | |
| | | | GGGTGGTTA | |
| | | | A | |
| 20:32434454:CACCCT:C | NA | frameshift | c.1743_1747 | p.Pro582fs |
| | | | delACCCT | |
| 20:32434454:CACCCTG | NA | frameshift | c.1743_1753 | p.Pro582fs |
| GGTGG:C | | | delACCCTGG | |
| | | | GTGG | |
| 20:32434455:ACCCTGG | NA | frameshift | c.1744_1751 | p.Pro582fs |
| GT:A | | | delCCCTGGG | |
| | | | T | |
| 20:32434456:CCCTGGG | NA | frameshift | c.1745_1752 | p.Pro582fs |
| TG:C | | | delCCTGGGT | |
| | | | G | |
| 20:32434457:C:CCTGGG | NA | frameshift | c.1747_1762 | p.Gln588fs |
| TGGTTAAAGGT | | | dupTGGGTG | |
| | | | GTTAAAGGT | |
| | | | C | |
| 20:32434459:TGGGTGG | NA | frameshift | c.1750_1760 | p.Va1584fs |
| TTAAA:T | | | delGTGGTTA | |
| | | | AAGG | |
| 20:32434460:G:A | rs763361634 | stop_gained | c.1748G > A | p.Trp583* |
| 20:32434461:G:A | rs1174760074 | stop_gained | c.1749G > A | p.Trp583* |
| 20:32434463:T:TAACC | rs768359987 | frameshift | c.1751_1752 | p.Va1585fs |
| | | | insAACC | |
| 20:32434465:G:GTTAAA | NA | frameshift | c.1757_1772 | p.Tyr591fs |
| GGTCAGCCCAC | | | dupAAGGTC | |
| | | | AGCCCACTT | |
| | | | A | |
| 20:32434466:T:TTAAA | NA | frameshift | c.1755_1758 | p.Gly587fs |
| | | | dupTAAA | |
| 20:32434467:T:TA | NA | frameshift | c.1758dupA | p.Gly587fs |
| 20:32434468:A:T | NA | stop_gained | c.1756A > T | p.Lys586* |
| 20:32434472:G:GT | NA | frameshift | c.1761dupT | p.Gln588fs |
| 20:32434473:T:TC | NA | frameshift | c.1762dupC | p.Gln588fs |
| 20:32434474:C:CA | NA | frameshift | c.1763dupA | p.Pro589fs |
| 20:32434474:C:T | rs1486082302 | stop_gained | c.1762C > T | p.Gln588* |
| 20:32434478:CCA:C | NA | frameshift | c.1768_1769 | p.Thr590fs |
| | | | delAC | |
| 20:32434481:C:CT | | frameshift | c.1771dupT | p.Tyr591fs |
| 20:32434481:CTT:C | rs774161869 | frameshift | c.1770_1771 | p.Tyr591fs |
| | | | delTT | |
| 20:32434483:T:TA | rs1491418513, | frameshift | c.1772dupA | p.Tyr591fs |
| | rs762036456 | | | |
| 20:32434483:T:TAA | NA | frameshift | c.1772_1773 | p.Tyr591fs |
| | | | insAA | |
| 20:32434483:T:TAG | NA | frameshift | c.1772_1773 | p.Tyr591fs |
| | | | insGA | |
| 20:32434483:TAC:T | NA | frameshift | c.1772_1773 | p.Tyr591fs |
| | | | delAC | |
| 20:32434483:TACC:T | NA | stop_gained | c.1773_1775 | p.Tyr591_Gln592 |
| | | | delCCA | delinsTer |
| 20:32434483:TACCAG:T | NA | frameshift | c.1773_1777 | p.Gln592fs |
| | | | delCCAGA | |
| 20:32434483:TACCAGA | NA | frameshift | c.1772_1785 | p.Tyr591fs |
| TATGCCCC:T | | | delACCAGAT | |
| | | | ATGCCCC | |
| 20:32434484:ACCAGAT | NA | frameshift | c.1773_1780 | p.Tyr591fs |
| AT:A | | | delCCAGATA | |
| | | | T | |
| 20:32434485:C:A | rs371369583 | stop_gained | c.1773C > A | p.Tyr591* |
| 20:32434485:C:G | rs371369583 | stop_gained | c.1773C > G | p.Tyr591* |
| 20:32434486:C:T | rs951716574 | stop_gained | c.1774C > T | p.Gln592* |
| 20:32434488:GA:G | NA | frameshift | c.1777delA | p.Ile593fs |
| 20:32434488:GAT:G | NA | frameshift | c.1779_1780 | p.Ile593fs |
| | | | delAT | |
| 20:32434490:T:TA | rs1314081658 | frameshift | c.1779dupA | p.Cys594fs |
| 20:32434493:G:GC | NA | frameshift | c.1786dupC | p.Arg596fs |
| 20:32434494:C:A | rs755974145 | stop_gained | c.1782C > A | p.Cys594* |
| 20:32434503:C:CATCCC | NA | frameshift | c.1793_1805 | p.Glu602fs |
| CACCACGG | | | dupTCCCCAC | |
| | | | CACGGA | |
| 20:32434505:T:TCCCCA | NA | frameshift | c.1796_1800 | p.Thr601fs |
| | | | dupCCACC | |
| 20:32434509:C:CA | NA | frameshift | c.1798dupA | p.Thr600fs |
| 20:32434514:C:CGGCA | NA | frameshift | c.1804_1805 | p.Glu602fs |
| | | | insCAGG | |
| 20:32434516:G:T | rs907795578 | stop_gained | c.1804G > T | p.Glu602* |
| 20:32434520:C:CCAACC | NA | frameshift | c.1809_1810 | p.Ser604fs |
| CCGGCAGGAGGA | | | insAACCCCG | |
| | | | GCAGGAGGA | |
| | | | C | |
| 20:32434524:C:CG | NA | frameshift | c.1812_1813 | p.Cys605fs |
| | | | insG | |
| 20:32434530:G:GCAGG | NA | frameshift | c.1818_1819 | p.Gly607fs |
| AGGACTCCGT | | | insCAGGAGG | |
| | | | ACTCCGT | |
| 20:32434543:G:GC | NA | frameshift | c.1833dupC | p.Arg612fs |
| 20:32434543:GCC:G | | frameshift | c.1832_1833 | p.Ala611fs |
| | | | delCC | |
| 20:32434549:A:AC | NA | frameshift | c.1840dupC | p.Leu614fs |
| 20:32434550:CCCTCGCA | NA | frameshift | c.1841_1857 | p.Leu614fs |
| GACATTAAAG:C | | | delTCGCAGA | |
| | | | CATTAAAGC | |
| | | | C | |
| 20:32434553:TCG:T | NA | frameshift | c.1843_1844 | p.Ala615fs |
| | | | delGC | |
| 20:32434558:GAC:G | NA | frameshift | c.1848_1849 | p.Ile617fs |
| | | | delCA | |
| 20:32434560:C:CT | rs767955952 | frameshift | c.1848_1849 | p.Ile617fs |
| | | | insT | |
| 20:32434560:C:CTA | NA | frameshift | c.1848_1849 | p.Ile617fs |
| | | | insTA | |
| 20:32434560:C:CTAAT | NA | frameshift | c.1848_1849 | p.Ile617fs |
| | | | insTA AT | |
| 20:32434560:CAT:C | | frameshift | c.1849_1850 | p.Ile617fs |
| | | | delAT | |
| 20:32434561:A:AT | NA | frameshift | c.1851dupT | p.Lys618fs |
| 20:32434562:T:TA | rs773562079 | frameshift | c.1850_1851 | p.Lys618fs |
| | | | insA | |
| 20:32434563:T:TA | NA | frameshift | c.1854dupA | p.Ala619fs |
| 20:32434563:TAA:T | NA | frameshift | c.1853_1854 | p.Lys618fs |
| | | | delAA | |
| 20:32434567:G:GC | NA | frameshift | c.1858dupC | p.Arg620fs |
| 20:32434567:GCC:G | NA | frameshift | c.1857_1858 | p.Arg620fs |
| | | | delCC | |
| 20:32434567:GCCCGTG | NA | frameshift | c.1857_1891 | p.Arg620fs |
| CTCTGCAGGTCCGAGGG | | | delCCGTGCT | |
| GCGAGAGGTCAC:G | | | CTGCAGGTC | |
| | | | CGAGGGGCG | |
| | | | AGAGGTCAC | |
| | | | c | |
| 20:32434571:GTGCTC:G | NA | frameshift | c.1863_1867 | p.Leu622fs |
| | | | delTCTGC | |
| 20:32434574:CTCTGCA | NA | frameshift | c.1865_1872 | p.Leu622fs |
| GG:C | | | delTGCAGGT | |
| | | | C | |
| 20:32434579:C:CA | NA | frameshift | c.1868dupA | p.Va1624fs |
| 20:32434579:C:CAGGTC | NA | frameshift | c.1871_1877 | p.Ala627fs |
| CG | | | dupTCCGAG | |
| | | | G | |
| 20:32434579:C:T | rs111316898 | stop_gained | c.1867C > T | p.Gln623* |
| 20:32434580:AGGTCC:A | NA | frameshift | c.1870_1874 | p.Va1624fs |
| | | | delGTCCG | |
| 20:32434582:G:GT | NA | frameshift | c.1871dupT | p.Arg625fs |
| 20:32434583:T:TA | NA | frameshift | c.1871_1872 | p.Arg625fs |
| | | | insA | |
| 20:32434587:A:AG | NA | frameshift | c.1879dupG | p.Ala627fs |
| 20:32434592:C:CGAGA | NA | frameshift | c.1882_1885 | p.Gly629fs |
| | | | dupAGAG | |
| 20:32434592:CGA:C | NA | frameshift | c.1884_1885 | p.Gly629fs |
| | | | delAG | |
| 20:32434596:AGGTCAC | NA | frameshift | c.1887_1909 | p.Glu635fs |
| CACTGCCATAGAGAGGC: | | | delTCACCAC | |
| A | | | TGCCATAGA | |
| | | | GAGGCGG | |
| 20:32434599:TCACCACT | rs766433101 | frameshift | c.1900_1922 | p.Glu635fs |
| GCCATAGAGAGGCGGC: | | | delAGAGAG | |
| T | | | GCGGCCACC | |
| | | | ACTGCCAT | |
| 20:32434608:C:A | rs1356224550 | stop_gained | c.1896C > A | p.Cys632* |
| 20:32434610:A:AT | NA | frameshift | c.l899dupT | p.Arg634fs |
| 20:32434611:T:TA | NA | frameshift | c.l900dupA | p.Arg634fs |
| 20:32434611:TAG:T | rs753983192 | frameshift | c.1904_1905 | p.Glu635fs |
| | | | delAG | |
| 20:32434612:A:T | NA | stop_gained | c.1900A > T | p.Arg634* |
| 20:32434612:AGAGAGG | rs755053984 | frameshift | c.1902_1924 | p.Glu635fs |
| CGGCCACCACTGCCATC: | | | delAGAGGC | |
| A | | | GGCCACCAC | |
| | | | TGCCATCG | |
| 20:32434615:G:T | NA | stop_gained | c.1903G > T | p.Glu635* |
| 20:32434621:G:GC | NA | frameshift | c.1911dupC | p.Thr638fs |
| 20:32434622:CCA:C | NA | frameshift | c.1912_1913 | p.Thr638fs |
| | | | delAC | |
| 20:32434623:CACCACT | NA | frameshift | c.1912_1928 | p.Thr638fs |
| GCCATCGGAGG:C | | | delACCACTG | |
| | | | CCATCGGAG | |
| | | | G | |
| 20:32434624:ACCACTG | NA | frameshift | c.1913_1932 | p.Thr638fs |
| CCATCGGAGGGGGG:A | | | delCCACTGC | |
| | | | CATCGGAGG | |
| | | | GGGG | |
| 20:32434624:ACCACTG | NA | frameshift | c.1913_1935 | p.Thr638fs |
| CCATCGGAGGGGGGGG | | | delCCACTGC | |
| T:A | | | CATCGGAGG | |
| | | | GGGGGGT | |
| 20:32434626:C:CACTA | NA | frameshift | c.1917_1918 | p.Ala640fs |
| | | | insAACT | |
| 20:32434626:CA:C | NA | frameshift | c.1915delA | p.Thr639fs |
| 20:32434626:CACTGCC | NA | frameshift | c.1915_1928 | p.Thr639fs |
| ATCGGAGG:C | | | delACTGCCA | |
| | | | TCGGAGG | |
| 20:32434626:CACTGCC | NA | frameshift | c.1915_1931 | p.Thr639fs |
| ATCGGAGGGGG:C | | | delACTGCCA | |
| | | | TCGGAGGGG | |
| | | | G | |
| 20:32434627:ACTGCCAT | NA | frameshift | c.1916_1929 | p.Thr639fs |
| CGGAGGG:A | | | delCTGCCAT | |
| | | | CGGAGGG | |
| 20:32434627:ACTGCCAT | NA | frameshift | c.1916_1935 | p.Thr639fs |
| CGGAGGGGGGGGT:A | | | delCTGCCAT | |
| | | | CGGAGGGG | |
| | | | GGGGT | |
| 20:32434628:CTGCCA:C | NA | frameshift | c.1918_1922 | p.Ala640fs |
| | | | delGCCAT | |
| 20:32434628:CTGCCATC | NA | frameshift | c.1917_1927 | p.Ala640fs |
| GGAG:C | | | delTGCCATC | |
| | | | GGAG | |
| 20:32434628:CTGCCATC | NA | frameshift | c.1917_1930 | p.Ala640fs |
| GGAGGGG:C | | | delTGCCATC | |
| | | | GGAGGGG | |
| 20:32434629:TGCCATC | rs1262176022 | frameshift | c.1919_1929 | p.Ala640fs |
| GGAGG:T | | | delCCATCGG | |
| | | | AGGG | |
| 20:32434629:TGCCATC | NA | frameshift | c.1918_1937 | p.Ala640fs |
| GGAGGGGGGGGTGG:T | | | delGCCATCG | |
| | | | GAGGGGGG | |
| | | | GGTGG | |
| 20:32434632:CAT:C | NA | frameshift | c.1921_1922 | p.Ile641fs |
| | | | delAT | |
| 20:32434632:CATCGGA | NA | frameshift | c.1921_1928 | p.Ile641fs |
| GG:C | | | delATCGGAG | |
| | | | G | |
| 20:32434635:CGGAG:C | NA | frameshift | c.1926_1929 | p.Gly644fs |
| | | | delAGGG | |
| 20:32434635:CGGAGG: | NA | frameshift | c.1926_1930 | p.Gly644fs |
| C | | | delAGGGG | |
| 20:32434636:G:T | rs892732207 | stop_gained | c.1924G > T | p.Gly642* |
| 20:32434637:G:GA | rs752984377 | frameshift | c.1926dupA | p.Gly643fs |
| 20:32434637:G:GT | NA | frameshift | c.1925_1926 | p.Gly643fs |
| | | | insT | |
| 20:32434638:A:AG | rs1085307856, | frameshift | c.1934dupG | p.Gly646fs |
| | rs756958159 | | | |
| 20:32434638:A:AGAGG | NA | frameshift | c.1927_1928 | p.Gly643fs |
| | | | insAGGG | |
| 20:32434638:AGGGGG: | NA | frameshift | c.1930_1934 | p.Gly644fs |
| A | | | delGGGGG | |
| 20:32434639:G:GA | NA | frameshift | c.1927_1928 | p.Gly643fs |
| | | | insA | |
| 20:32434639:G:GC | NA | frameshift | c.1927_1928 | p.Gly643fs |
| | | | insC | |
| 20:32434639:GGGGGG | NA | frameshift | c.1930_1937 | p.Gly644fs |
| GGT:G | | | delGGGGGT | |
| | | | GG | |
| 20:32434646:G:GT | NA | frameshift | c.1935dupT | p.Gly646fs |
| 20:32434647:TGGCCCG | NA | frameshift | c.1940_1962 | p.Pro647fs |
| GGTGGAGGTGGCGGCG | | | delCGGGTGG | |
| G:T | | | AGGTGGCGG | |
| | | | CGGGGCC | |
| 20:32434649:G:GC | NA | frameshift | c.1940dupC | p.Gly649fs |
| 20:32434649:GCC:G | NA | frameshift | c.1939_1940 | p.Pro647fs |
| | | | delCC | |
| 20:32434649:GCCCGGG | NA | frameshift | c.1940_1965 | p.Pro647fs |
| TGGAGGTGGCGGCGGG | | | delCGGGTGG | |
| GCCA:G | | | AGGTGGCGG | |
| | | | CGGGGCCAC | |
| | | | C | |
| 20:32434652:CGG:C | NA | frameshift | c.1942_1943 | p.Gly648fs |
| | | | delGG | |
| 20:32434652:CGGGTG:C | NA | frameshift | c.1942_1946 | p.Gly648fs |
| | | | delGGTGG | |
| 20:32434655:G:GT | NA | frameshift | c.1944dupT | p.Gly649fs |
| 20:32434657:G:T | NA | stop_gained | c.1945G > T | p.Gly649* |
| 20:32434657:GGA:G | NA | frameshift | c.1947_1948 | p.Gly650fs |
| | | | delAG | |
| 20:32434662:T:TG | NA | frameshift | c.1952dupG | p.Gly652fs |
| 20:32434662:TGGCGGC | NA | frameshift | c.1953_1972 | p.Gly652fs |
| GGGGCCACCGATGA:T | | | delCGGCGG | |
| | | | GGCCACCGA | |
| | | | TGAGG | |
| 20:32434668:CGGGGCC | NA | frameshift | c.1960_1973 | p.Ala654fs |
| ACCGATGA:C | | | delGCCACCG | |
| | | | ATGAGGG | |
| 20:32434670:G:GT | NA | frameshift | c.1958_1959 | p.Ala654fs |
| | | | insT | |
| 20:32434672:GCCACCG | NA | frameshift | c.1961_1968 | p.Ala654fs |
| AT:G | | | delCCACCGA | |
| | | | T | |
| 20:32434675:A:AC | NA | frameshift | c.1965dupC | p.Asp656fs |
| 20:32434676:CCGATG:C | NA | frameshift | c.1965_1969 | p.Asp656fs |
| | | | delCGATG | |
| 20:32434680:T:TG | NA | frameshift | c.1969dupG | p.Glu657fs |
| 20:32434680:T:TGAGG | NA | frameshift | c.1973_1976 | p.Gly660fs |
| | | | dupGAGG | |
| 20:32434681:G:T | NA | stop_gained | c.1969G > T | p.Glu657* |
| 20:32434684:G:T | NA | stop_gained | c.1972G > T | p.Gly658* |
| 20:32434692:C:CA | NA | frameshift | c.1981dupA | p.Arg661fs |
| 20:32434693:A:T | NA | stop_gained | c.1981A > T | p.Arg661* |
| 20:32434702:AGC:A | NA | frameshift | c.1991_1992 | p.Ser664fs |
| | | | delGC | |
| 20:32434702:AGCAGTG | NA | frameshift | c.1992_2002 | p.Ser664fs |
| GTGAT:A | | | delCAGTGGT | |
| | | | GATG | |
| 20:32434712:A:ATGGTG | NA | frameshift | c.2003_2015 | p.Cys672fs |
| GTGAGGCC | | | dupGTGGTG | |
| | | | AGGCCTG | |
| 20:32434718:G:GTGAG | NA | frameshift | c.2009_2015 | p.Cys672fs |
| GCC | | | dupAGGCCT | |
| | | | G | |
| 20:32434721:AGG:A | NA | frameshift | c.2010_2011 | p.Glu670fs |
| | | | delGG | |
| 20:32434723:G:GC | NA | frameshift | c.2013dupC | p.Cys672fs |
| 20:32434728:T:A | NA | stop_gained | c.2016T > A | p.Cys672* |
| 20:32434728:T:TGGCCT | NA | frameshift | c.2020_2021 | p.His674fs |
| CCCCTGGGCTCAGGGTG | | | insTCCCCTG | |
| GCCACA | | | GGCTCAGGG | |
| | | | TGGCCACAG | |
| | | | GCC | |
| 20:32434731:CCACCCTG | NA | frameshift | c.2020_2027 | p.His674fs |
| A:C | | | delCACCCTG | |
| | | | A | |
| 20:32434732:C:CT | NA | frameshift | c.2020_2021 | p.His674fs |
| | | | insT | |
| 20:32434734:CCCTGAG | NA | frameshift | c.2025_2041 | p.Pro677fs |
| CCCAGGGGAGG:C | | | delTGAGCCC | |
| | | | AGGGGAGG | |
| | | | CC | |
| 20:32434737:TGAGCCC | NA | frameshift | c.2027_2034 | p.Glu676fs |
| AG:T | | | delAGCCCAG | |
| | | | G | |
| 20:32434738:G:T | NA | stop_gained | c.2026G > T | p.Glu676* |
| 20:32434744:A:AG | NA | frameshift | c.2036dupG | p.Gly680fs |
| 20:32434744:AG:A | NA | frameshift | c.2036delG | p.Gly679fs |
| 20:32434747:G:T | NA | stop_gained | c.2035G > T | p.Gly679* |
| 20:32434757:G:GT | NA | frameshift | c.2045_2046 | p.Thr683fs |
| | | | insT | |
| 20:32434759:A:AT | NA | frameshift | c.2047_2048 | p.Thr683fs |
| | | | insT | |
| 20:32434763:C:CT | NA | frameshift | c.2052dupT | p.Gly685fs |
| 20:32434765:G:T | NA | stop_gained | c.2053G > T | p.Gly685* |
| 20:32434768:A:T | NA | stop_gained | c.2056A > T | p.Lys686* |
| 20:32434769:AGT:A | rs780146542 | frameshift | c.2060_2061 | p.Cys687fs |
| | | | delGT | |
| 20:32434772:GTACGTC | NA | frameshift | c.2064_2074 | p.Ser689fs |
| AGATC:G | | | delGTCAGAT | |
| | | | CTAC | |
| 20:32434773:T:A | rs1160049111 | stop_gained | c.2061T > A | p.Cys687* |
| 20:32434778:C:CA | NA | frameshift | c.2067dupA | p.Asp690fs |
| 20:32434778:C:G | rs1387681483 | stop_gained | c.2066C > G | p.Ser689* |
| 20:32434786:C:T | rs1478929932 | stop_gained | c.2074C > T | p.Gln692* |
| 20:32434789:C:T | rs373221034 | stop_gained | c.2077C > T | p.Arg693* |
| 20:32434789:CG:C | NA | frameshift | c.2078delG | p.Arg693fs |
| 20:32434790:GAACAC:G | NA | frameshift | c.2082_2086 | p.Gln695fs |
| | | | delACAAC | |
| 20:32434792:AC:A | NA | frameshift | c.2081delC | p.Thr694fs |
| 20:32434795:C:CA | NA | frameshift | c.2085dupA | p.Leu696fs |
| 20:32434795:C:CAACT | NA | frameshift | c.2085_2088 | p.Leu697fs |
| | | | dupACTA | |
| 20:32434795:C:CT | NA | frameshift | c.2083_2084 | p.Gln695fs |
| | | | insT | |
| 20:32434795:C:T | NA | stop_gained | c.2083C > T | p.Gln695* |
| 20:32434795:CA:C | NA | frameshift | c.2085delA | p.Gln695fs |
| 20:32434797:A:AG | NA | frameshift | c.2085_2086 | p.Leu696fs |
| | | | insG | |
| 20:32434797:AC:A | NA | frameshift | c.2086delC | p.Leu696fs |
| 20:32434798:C:CA | NA | frameshift | c.2086_2087 | p.Leu696fs |
| | | | insA | |
| 20:32434799:T:TA | rs1284591534 | frameshift | c.2088dupA | p.Leu697fs |
| 20:32434800:ACTGCCG | NA | frameshift | c.2091_2097 | p.Pro698fs |
| C:A | | | delGCCGCCT | |
| 20:32434804:CCGCCTTA | NA | frameshift | c.2094_2104 | p.Pro699fs |
| TCCT:C | | | delGCCTTAT | |
| | | | CCTC | |
| 20:32434809:TTATCCTC | NA | frameshift | c.2100_2106 | p.Tyr700fs |
| T | | | delTCCTCTA | |
| 20:32434810:T:TA | NA | frameshift | c.2099dupA | p.Tyr700fs |
| 20:32434810:T:TATCCT | NA | frameshift | c.2099_2127 | p.Gly710fs |
| CTAAATGGGGAGCATAC | | | dupATCCTCT | |
| CCAGGCC | | | AAATGGGGA | |
| | | | GCATACCCA | |
| | | | GGCC | |
| 20:32434813:C:CCT | NA | frameshift | c.2104_2105 | p.Asn703fs |
| | | | dupCT | |
| 20:32434821:T:TG | NA | frameshift | c.2113dupG | p.Glu705fs |
| 20:32434821:TG:T | rs778670589 | frameshift | c.2113delG | p.Glu705fs |
| 20:32434825:G:T | NA | stop_gained | c.2113G > T | p.Glu705* |
| 20:32434825:GA:G | NA | frameshift | c.2114delA | p.Glu705fs |
| 20:32434827:GCATA:G | NA | frameshift | c.2117_2120 | p.His706fs |
| | | | delATAC | |
| 20:32434830:T:TA | NA | frameshift | c.2119dupA | p.Thr707fs |
| 20:32434831:AC:A | NA | frameshift | c.2122delC | p.Gln708fs |
| 20:32434831:ACC:A | NA | frameshift | c.2121_2122 | p.Gln708fs |
| | | | delCC | |
| 20:32434832:CCCAGGC | NA | frameshift | c.2124_2137 | p.Gln708fs |
| CGGAACTG:C | | | delGGCCGGA | |
| | | | ACTGCCA | |
| 20:32434834:C:T | rs755789372 | stop_gained | c.2122C > T | p.Gln708* |
| 20:32434839:CG:C | rs772303842 | frameshift | c.2129delG | p.Gly710fs |
| 20:32434840:G:T | NA | stop_gained | c.2128G > T | p.Gly710* |
| 20:32434840:GGAACTG | NA | frameshift | c.2130_2139 | p.Thr711fs |
| CCAT:G | | | delAACTGCC | |
| | | | ATG | |
| 20:32434841:GA:G | NA | frameshift | c.2131delA | p.Thr711fs |
| 20:32434842:AAC:A | NA | frameshift | c.2131_2132 | p.Thr711fs |
| | | | delAC | |
| 20:32434843:AC:A | NA | frameshift | c.2132delC | p.Thr711fs |
| 20:32434843:ACTGCCAT | NA | frameshift | c.2132_2139 | p.Thr711fs |
| G:A | | | delCTGCCAT | |
| | | | G | |
| 20:32434845:TG:T | NA | frameshift | c.2134delG | p.Ala712fs |
| 20:32434845:TGCCATGT | NA | frameshift | c.2135_2144 | p.Ala712fs |
| CCA:T | | | delCCATGTC | |
| | | | CAG | |
| 20:32434846:GC:G | NA | frameshift | c.2136delC | p.Met713fs |
| 20:32434847:CCA:C | NA | frameshift | c.2136_2137 | p.Met713fs |
| | | | delCA | |
| 20:32434851:G:GTC | NA | frameshift | c.2140_2141 | p.Arg715fs |
| | | | dupTC | |
| 20:32434852:TC:T | NA | frameshift | c.2142delC | p.Arg715fs |
| 20:32434852:TCCA:T | NA | stop_gained | c.2141_2143 | p.Ser714_Arg715 |
| | | | delCCA | delinsTer |
| 20:32434856:GA:G | NA | frameshift | c.2145delA | p.Ala716fs |
| 20:32434857:AG:A | NA | frameshift | c.2146delG | p.Ala716fs |
| 20:32434858:GC:G | NA | frameshift | c.2147delC | p.Ala716fs |
| 20:32434859:CT:C | NA | frameshift | c.2148delT | p.Arg717fs |
| 20:32434860:T:TAG | NA | frameshift | c.2149_2150 | p.Arg718fs |
| | | | dupAG | |
| 20:32434862:GGA:G | NA | frameshift | c.2156_2157 | p.Glu719fs |
| | | | delAG | |
| 20:32434862:GGAGA:G | NA | frameshift | c.2154_2157 | p.Glu719fs |
| | | | delAGAG | |
| 20:32434863:GA:G | NA | frameshift | c.2152delA | p.Arg718fs |
| 20:32434864:A:T | NA | stop_gained | c.2152A > T | p.Arg718* |
| 20:32434864:AG:A | NA | frameshift | c.2153delG | p.Arg718fs |
| 20:32434867:G:T | NA | stop_gained | c.2155G > T | p.Glu719* |
| 20:32434867:GA:G | NA | frameshift | c.2156delA | p.Glu719fs |
| 20:32434868:A:AG | NA | frameshift | c.2158dupG | p.Asp720fs |
| 20:32434868:AG:A | NA | frameshift | c.2158delG | p.Asp720fs |
| 20:32434874:TG:T | NA | frameshift | c.2163delG | p.Pro722fs |
| 20:32434875:GC:G | NA | frameshift | c.2165delC | p.Pro722fs |
| 20:32434877:CT:C | NA | frameshift | c.2167delT | p.Ser723fs |
| 20:32434878:T:TTCTCA | NA | frameshift | c.2170_2171 | p.Leu724fs |
| GAGAAGGCAGGTCC | | | insAGAGAAG | |
| | | | GCAGGTCCT | |
| | | | CTC | |
| 20:32434878:T:TTTCTCA | NA | frameshift | c.2167_2168 | p.Ser723fs |
| GAGAAGGCAGGTCC | | | insTCTCAGA | |
| | | | GAAGGCAGG | |
| | | | TCCT | |
| 20:32434885:A:T | rs757533853 | stop_gained | c.2173A > T | p.Arg725* |
| 20:32434886:GA:G | NA | frameshift | c.2177delA | p.Lys726fs |
| 20:32434888:A:T | rs1415948169 | stop_gained | c.2176A > T | p.Lys726* |
| 20:32434889:AG:A | NA | frameshift | c.2179delG | p.Glu727fs |
| 20:32434891:G:T | rs1264581343 | stop_gained | c.2179G > T | p.Glu727* |
| 20:32434891:GA:G | NA | frameshift | c.2180delA | p.Glu727fs |
| 20:32434894:G:T | NA | stop_gained | c.2182G > T | p.Glu728* |
| 20:32434894:GA:G | NA | frameshift | c.2185delA | p.Ser729fs |
| 20:32434898:GC:G | NA | frameshift | c.2187delC | p.Cys730fs |
| 20:32434901:GCCTACTA: | NA | frameshift | c.2191_2197 | p.Leu731fs |
| G | | | delCTACTAC | |
| 20:32434902:C:A | rs1297030768 | stop_gained | c.2190C > A | p.Cys730* |
| 20:32434903:C:CTA | NA | frameshift | c.2192_2193 | p.Leu732fs |
| | | | dupTA | |
| 20:32434904:TACTACA | NA | frameshift | c.2195_2219 | p.Leu732fs |
| GAGGGCTACAGTTGGAC | | | delTACAGAG | |
| TC:T | | | GGCTACAGT | |
| | | | TGGACTCAC | |
| 20:32434906:C:CTA | NA | frameshift | c.2195_2196 | p.Gln733fs |
| | | | dupTA | |
| 20:32434908:AC:A | rs777135381 | frameshift | c.2197delC | p.Gln733fs |
| 20:32434909:C:T | rs387907078 | stop_gained | c.2197C > T | p.Gln733* |
| 20:32434912:A:AGG | NA | frameshift | c.2202_2203 | p.Ala735fs |
| | | | dupGG | |
| 20:32434912:AG:A | rs1476818548 | frameshift | c.2203delG | p.Ala735fs |
| 20:32434920:AG:A | NA | frameshift | c.2209delG | p.Va1737fs |
| 20:32434923:TG:T | NA | frameshift | c.2213delG | p.Gly738fs |
| 20:32434924:G:T | rs1165142818 | stop_gained | c.2212G > T | p.Gly738* |
| 20:32434925:GACTC:G | NA | frameshift | c.2216_2219 | p.Leu739fs |
| | | | delTCAC | |
| 20:32434927:CT:C | NA | frameshift | c.2216delT | p.Leu739fs |
| 20:32434928:T:TCA | NA | frameshift | c.2219_2220 | p.Asp741fs |
| | | | dupCA | |
| 20:32434934:A:ATG | NA | frameshift | c.2223_2224 | p.Gly742fs |
| | | | dupTG | |
| 20:32434938:GC:G | NA | frameshift | c.2227delC | p.Leu743fs |
| 20:32434940:TA:T | NA | frameshift | c.2229delA | p.Gly744fs |
| 20:32434941:A:AG | NA | frameshift | c.2231dupG | p.Asp745fs |
| 20:32434943:GA:G | NA | frameshift | c.2232delA | p.Asp745fs |
| 20:32434946:AT:A | NA | frameshift | c.2235delT | p.Asp745fs |
| 20:32434948:GC:G | NA | frameshift | c.2238delC | p.Ser747fs |
| 20:32434951:TC:T | NA | frameshift | c.2242delC | p.Gln748fs |
| 20:32434954:C:T | rs1202551247 | stop_gained | c.2242C > T | p.Gln748* |
| 20:32434954:CA:C | NA | frameshift | c.2244delA | p.Gln748fs |
| 20:32434957:CT:C | NA | frameshift | c.2246delT | p.Leu749fs |
| 20:32434958:TC:T | rs1481246277 | frameshift | c.2250delC | p.Va1751fs |
| 20:32434962:C:CA | NA | frameshift | c.2250_2251 | p.Va1751fs |
| | | | insA | |
| 20:32434963:GT:G | NA | frameshift | c.2253delT | p.Ala752fs |
| 20:32434963:GTTGCTCC | NA | frameshift | c.2253_2262 | p.Ala752fs |
| CAC:G | | | delTGCTCCC | |
| | | | ACT | |
| 20:32434965:T:TA | NA | frameshift | c.2253_2254 | p.Ala752fs |
| | | | insA | |
| 20:32434965:T:TG | rs1214641052 | frameshift | c.2254dupG | p.Ala752fs |
| 20:32434965:TG:T | NA | frameshift | c.2254delG | p.Ala752fs |
| 20:32434968:TC:T | NA | frameshift | c.2259delC | p.Thr754fs |
| 20:32434968:TCCCACTG | NA | frameshift | c.2259_2278 | p.Thr754fs |
| GGGACCAGCCATG:T | | | delCACTGGG | |
| | | | GACCAGCCA | |
| | | | TGCC | |
| 20:32434970:C:CCCAGT | NA | frameshift | c.2259_2260 | p.Thr754fs |
| GGGAG | | | insCAGTGGG | |
| | | | AGC | |
| 20:32434970:CCACTG:C | NA | frameshift | c.2259_2263 | p.Thr754fs |
| | | | delCACTG | |
| 20:32434970:CCACTGG | NA | frameshift | c.2259_2274 | p.Thr754fs |
| GGACCAGCCA:C | | | delCACTGGG | |
| | | | GACCAGCCA | |
| 20:32434971:C:CCAGTG | NA | frameshift | c.2259_2260 | p.Thr754fs |
| GGAGCA | | | insCAGTGGG | |
| | | | AGCA | |
| 20:32434971:CA:C | NA | frameshift | c.2260delA | p.Thr754fs |
| 20:32434972:AC:A | NA | frameshift | c.2261delC | p.Thr754fs |
| 20:32434973:CT:C | NA | frameshift | c.2262delT | p.Asp756fs |
| 20:32434974:TG:T | NA | frameshift | c.2266delG | p.Asp756fs |
| 20:32434979:AC:A | rs1449831583 | frameshift | c.2269delC | p.Gln757fs |
| 20:32434981:C:T | rs779078826 | stop_gained | c.2269C > T | p.Gln757* |
| 20:32434985:CA:C | NA | frameshift | c.2274delA | p.Cys759fs |
| 20:32434986:A:AT | | frameshift | c.2275dupT | p.Cys759fs |
| 20:32434986:A:ATG | NA | frameshift | c.2275_2276 | p.Gln760fs |
| | | | dupTG | |
| 20:32434988:GCCAGGC | NA | frameshift | c.2278_2290 | p.Gln760fs |
| CTTGCCC:G | | | delCAGGCCT | |
| | | | TGCCCC | |
| 20:32434989:C:A | NA | stop_gained | c.2277C > A | p.Cys759* |
| 20:32434990:C:T | rs1167715259 | stop_gained | c.2278C > T | p.Gln760* |
| 20:32434990:CA:C | NA | frameshift | c.2279delA | p.Gln760fs |
| 20:32434993:GC:G | NA | frameshift | c.2283delC | p.Leu762fs |
| 20:32434995:C:CT | NA | frameshift | c.2285dupT | p.Leu762fs |
| 20:32434997:T:A | NA | stop_gained | c.2285T > A | p.Leu762* |
| 20:32434998:GC:G | NA | frameshift | c.2290delC | p.Leu764fs |
| 20:32434998:GCC:G | NA | frameshift | c.2289_2290 | p.Leu764fs |
| | | | delCC | |
| 20:32435003:T:TA | NA | frameshift | c.2292dupA | p.Leu765fs |
| 20:32435004:AC:A | NA | frameshift | c.2293delC | p.Leu765fs |
| 20:32435004:ACTGTCCT | NA | frameshift | c.2294_2301 | p.Leu765fs |
| C:A | | | delTGTCCTC | |
| | | | C | |
| 20:32435004:ACTGTCCT | NA | frameshift | c.2296_2317 | p.Ser766fs |
| CCCAAACCTCAGTAG:A | | | delTCCTCCC | |
| | | | AAACCTCAG | |
| | | | TAGCTG | |
| 20:32435005:C:CT | NA | frameshift | c.2294dupT | p.Ser766fs |
| 20:32435005:CT:C | NA | frameshift | c.2294delT | p.Leu765fs |
| 20:32435008:TC:T | rs1315414366 | frameshift | c.2298delC | p.Ser767fs |
| 20:32435011:TC:T | NA | frameshift | c.2302delC | p.Gln768fs |
| 20:32435014:C:T | rs770762273 | stop_gained | c.2302C > T | p.Gln768* |
| 20:32435014:CA:C | NA | frameshift | c.2305delA | p.Thr769fs |
| 20:32435021:C:G | NA | stop_gained | c.2309C > G | p.Ser770* |
| 20:32435023:GT:G | NA | frameshift | c.2312delT | p.Va1771fs |
| 20:32435025:A:AGCTGA | NA | frameshift | c.2316_2344 | p.His782fs |
| GAGATTAGTGGAGCAGC | | | dupTGAGAG | |
| CTCAGTT | | | ATTAGTGGA | |
| | | | GCAGCCTCA | |
| | | | GTTGC | |
| 20:32435028:TGA:T | NA | frameshift | c.2321_2322 | p.Arg774fs |
| | | | delGA | |
| 20:32435029:G:GA | NA | frameshift | c.2318dupA | p.Arg774fs |
| 20:32435029:G:T | rs759218892 | stop_gained | c.2317G > T | p.Glu773* |
| 20:32435032:A:T | NA | stop_gained | c.2320A > T | p.Arg774* |
| 20:32435034:AT:A | rs765327792 | frameshift | c.2324delT | p.Leu775fs |
| 20:32435036:T:A | rs752263134 | stop_gained | c.2324T > A | p.Leu775* |
| 20:32435036:T:G | rs752263134 | stop_gained | c.2324T > G | p.Leu775* |
| 20:32435041:G:T | NA | stop_gained | c.2329G > T | p.Glu777* |
| 20:32435044:C:T | NA | stop_gained | c.2332C > T | p.Gln778* |
| 20:32435050:C:T | rs751021760 | stop_gained | c.2338C > T | p.Gln780* |
| 20:32435054:T:TG | NA | frameshift | c.2343dupG | p.His782fs |
| 20:32435065:GT:G | NA | frameshift | c.2355delT | p.Arg786fs |
| 20:32435066:T:TTA | NA | frameshift | c.2355_2356 | p.Arg786fs |
| | | | dupTA | |
| 20:32435074:G:GA | NA | frameshift | c.2364dupA | p.Cys789fs |
| 20:32435074:G:T | rs1402270258 | stop_gained | c.2362G > T | p.Glu788* |
| 20:32435074:GA:G | NA | frameshift | c.2364delA | p.Glu788fs |
| 20:32435075:A:AT | NA | frameshift | c.2363_2364 | p.Glu788fs |
| | | | insT | |
| 20:32435076:ATG:A | NA | frameshift | c.2367_2368 | p.Cys789fs |
| | | | delTG | |
| 20:32435078:G:GT | NA | frameshift | c.2367dupT | p.Glu790fs |
| 20:32435078:GT:G | NA | frameshift | c.2367delT | p.Cys789fs |
| 20:32435079:T:A | NA | stop_gained | c.2367T > A | p.Cys789* |
| 20:32435080:G:T | NA | stop_gained | c.2368G > T | p.Glu790* |
| 20:32435081:AG:A | NA | frameshift | c.2370delG | p.Glu790fs |
| 20:32435089:AC:A | NA | frameshift | c.2379delC | p.Thr794fs |
| 20:32435093:CT:C | NA | frameshift | c.2383delT | p.Ser795fs |
| 20:32435095:T:TA | NA | frameshift | c.2383_2384 | p.Ser795fs |
| | | | insA | |
| 20:32435095:TC:T | rs752828734 | frameshift | c.2385delC | p.Trp796fs |
| 20:32435097:CT:C | NA | frameshift | c.2386delT | p.Trp796fs |
| 20:32435099:G:A | rs770674396 | stop_gained | c.2387G > A | p.Trp796* |
| 20:32435100:G:A | NA | stop_gained | c.2388G > A | p.Trp796* |
| 20:32435100:GGA:G | NA | frameshift | c.2389_2390 | p.Glu797fs |
| | | | delGA | |
| 20:32435101:G:T | NA | stop_gained | c.2389G > T | p.Glu797* |
| 20:32435104:AG:A | NA | frameshift | c.2393delG | p.Ser798fs |
| 20:32435106:T:TGATGA | NA | frameshift | c.2406_2407 | p.Gln803fs |
| TGAGGAGG | | | insGGATGAT | |
| | | | GAGGAG | |
| 20:32435108:AT:A | NA | frameshift | c.2397delT | p.Asp799fs |
| 20:32435109:TG:T | NA | frameshift | c.2398delG | p.Asp800fs |
| 20:32435113:G:T | NA | stop_gained | c.2401G > T | p.Glu801* |
| 20:32435113:GA:G | NA | frameshift | c.2402delA | p.Glu801fs |
| 20:32435116:G:T | NA | stop_gained | c.2404G > T | p.Glu802* |
| 20:32435118:G:GCC | NA | frameshift | c.2407_2408 | p.Gln803fs |
| | | | insCC | |
| 20:32435118:GC:G | NA | frameshift | c.2407delC | p.Gln803fs |
| 20:32435119:C:T | rs775071544 | stop_gained | c.2407C > T | p.Gln803* |
| 20:32435121:AG:A | NA | frameshift | c.2411delG | p.Gly804fs |
| 20:32435124:A:AC | NA | frameshift | c.2415dupC | p.Thr806fs |
| 20:32435131:GT:G | | frameshift | c.2421delT | p.Pro808fs |
| 20:32435133:T:TC | NA | frameshift | c.2423dupC | p.Ala809fs |
| 20:32435133:TC:T | rs763280972 | frameshift | c.2423delC | p.Pro808fs |
| 20:32435133:TCC:T | NA | frameshift | c.2422_2423 | p.Pro808fs |
| | | | delCC | |
| 20:32435133:TCCTGC:T | NA | frameshift | c.2422_2426 | p.Pro808fs |
| | | | delCCTGC | |
| 20:32435140:GA:G | NA | frameshift | c.2429delA | p.Asp810fs |
| 20:32435141:ACAATGG | NA | frameshift | c.2431_2437 | p.Asn811fs |
| T:A | | | delAATGGTC | |
| 20:32435142:CAA:C | NA | frameshift | c.2431_2432 | p.Asn811fs |
| | | | delAA | |
| 20:32435145:T:TG | NA | frameshift | c.2435dupG | p.Pro813fs |
| 20:32435148:TC:T | NA | frameshift | c.2439delC | p.Ile814fs |
| 20:32435154:TC:T | NA | frameshift | c.2444delC | p.Pro815fs |
| 20:32435156:CG:C | NA | frameshift | c.2445delG | p.Ser816fs |
| 20:32435159:CTCTA:C | NA | frameshift | c.2448_2451 | p.Leu817fs |
| | | | delTCTA | |
| 20:32435159:CTCTAG:C | NA | frameshift | c.2449_2453 | p.Leu817fs |
| | | | delCTAGT | |
| 20:32435161:C:CT | NA | frameshift | c.2450dupT | p.Val818fs |
| 20:32435161:CT:C | NA | frameshift | c.2450delT | p.Leu817fs |
| 20:32435164:GT:G | NA | frameshift | c.2453delT | p.Val818fs |
| 20:32435165:TG:T | NA | frameshift | c.2456delG | p.Gly819fs |
| 20:32435170:G:GA | NA | frameshift | c.2459dupA | p.Asp820fs |
| 20:32435171:AT:A | NA | frameshift | c.2460delT | p.Asp820fs |
| 20:32435174:A:AT | NA | frameshift | c.2463dupT | p.Thr822fs |
| 20:32435174:ATACATTA | NA | frameshift | c.2463_2484 | p.Thr822fs |
| GAGAAAGGAACTGGC:A | | | delTACATTA | |
| | | | GAGAAAGGA | |
| | | | ACTGGC | |
| 20:32435175:T:TA | rs1221361018 | frameshift | c.2464dupA | p.Thr822fs |
| 20:32435176:A:AC | NA | frameshift | c.2465dupC | p.Leu823fs |
| 20:32435178:AT:A | rs767215739 | frameshift | c.2468delT | p.Leu823fs |
| 20:32435179:T:TA | NA | frameshift | c.2467_2468 | p.Leu823fs |
| | | | insA | |
| 20:32435180:T:A | NA | stop_gained | c.2468T > A | p.Leu823* |
| 20:32435180:T:G | NA | stop_gained | c.2468T > G | p.Leu823* |
| 20:32435180:T:TA | NA | frameshift | c.2469dupA | p.Glu824fs |
| 20:32435184:GA:G | NA | frameshift | c.2475delA | p.Gly826fs |
| 20:32435187:A:AG | NA | frameshift | c.2477dupG | p.Thr827fs |
| 20:32435187:AG:A | rs1064796100 | frameshift | c.2477delG | p.Gly826fs |
| 20:32435188:G:T | rs774018728 | stop_gained | c.2476G > T | p.Gly826* |
| 20:32435189:G:GAACT | NA | frameshift | c.2478_2481 | p.Gly828fs |
| | | | dupAACT | |
| 20:32435192:CT:C | NA | frameshift | c.2481delT | p.Gly828fs |
| 20:32435193:T:TG | NA | frameshift | c.2483dupG | p.Gln829fs |
| 20:32435197:C:T | rs1013267324 | stop_gained | c.2485C > T | p.Gln829* |
| 20:32435205:TGACA:T | NA | frameshift | c.2495_2498 | p.Asp832fs |
| | | | delACAG | |
| 20:32435208:CAGTCATC | NA | frameshift | c.2498_2523 | p.Ser833fs |
| CCACTATGAAGGATCCT | | | delGTCATCC | |
| GT:C | | | CACTATGAA | |
| | | | GGATCCTGT | |
| | | | A | |
| 20:32435210:GT:G | NA | frameshift | c.2499delT | p.His834fs |
| 20:32435212:C:CTG | NA | frameshift | c.2500_2501 | p.His834fs |
| | | | insTG | |
| 20:32435219:CT:C | NA | frameshift | c.2508delT | p.Met837fs |
| 20:32435221:AT:A | NA | frameshift | c.2510delT | p.Met837fs |
| 20:32435222:TG:T | NA | frameshift | c.2511delG | p.Met837fs |
| 20:32435225:AG:A | NA | frameshift | c.2515delG | p.Asp839fs |
| 20:32435233:GTA:G | NA | frameshift | c.2522_2523 | p.Val841fs |
| | | | delTA | |
| 20:32435234:TA:T | rs773442382 | frameshift | c.2525delA | p.Asn842fs |
| 20:32435238:TG:T | NA | frameshift | c.2527delG | p.Val843fs |
| 20:32435238:TGTGACC | NA | frameshift | c.2527_2534 | p.Val843fs |
| CC:T | | | delGTGACCC | |
| | | | C | |
| 20:32435242:A:AC | rs750170870 | frameshift | c.2535dupC | p.Ser846fs |
| 20:32435242:AC:A | NA | frameshift | c.2535delC | p.Ser846fs |
| 20:32435248:AGTTCCAC | NA | frameshift | c.2537_2555 | p.Ser846fs |
| ACCTGAATCCTC:A | | | delGTTCCAC | |
| | | | ACCTGAATC | |
| | | | CTC | |
| 20:32435251:TC:T | NA | frameshift | c.2541delC | p.Thr848fs |
| 20:32435252:CCA:C | NA | frameshift | c.2544_2545 | p.Pro849fs |
| | | | delAC | |
| 20:32435256:AC:A | NA | frameshift | c.2546delC | p.Pro849fs |
| 20:32435260:G:T | rs914002110 | stop_gained | c.2548G > T | p.Glu850* |
| 20:32435263:TC:T | NA | frameshift | c.2553delC | p.Ser852fs |
| 20:32435265:C:CT | NA | frameshift | c.2554dupT | p.Ser852fs |
| 20:32435267:C:G | NA | stop_gained | c.2555OG | p.Ser852* |
| 20:32435268:A:ACCGAC | NA | frameshift | c.2559_2617 | p.Pro873fs |
| TGATTGCCTGCAGAACA | | | dupGACTGA | |
| GAGCATTTGATGACGAA | | | TTGCCTGCA | |
| TTAGGGCTTGGTGGCTC | | | GAACAGAGC | |
| ATG | | | ATTTGATGA | |
| | | | CGAATTAGG | |
| | | | GCTTGGTGG | |
| | | | CTCATGCC | |
| 20:32435270:C:CTG | NA | frameshift | c.2558_2559 | p.Thr854fs |
| | | | insTG | |
| 20:32435273:CTGAT:C | rs755989932 | frameshift | c.2564_2567 | p.Asp855fs |
| | | | delATTG | |
| 20:32435274:T:TG | NA | frameshift | c.2563dupG | p.Asp855fs |
| 20:32435274:T:TGATTG | NA | frameshift | c.2565_2575 | p.Asn859fs |
| CCTGCA | | | dupTTGCCTG | |
| | | | CAGA | |
| 20:32435275:GATTGCCT | NA | frameshift | c.2565_2578 | p.Asp855fs |
| GCAGAAC:G | | | delTTGCCTG | |
| | | | CAGAACA | |
| 20:32435277:TTGCC:T | NA | frameshift | c.2569_2572 | p.Leu857fs |
| | | | delCTGC | |
| 20:32435283:GCAGAA: | NA | frameshift | c.2576_2580 | p.Asn859fs |
| G | | | delACAGA | |
| 20:32435284:C:T | NA | stop_gained | c.2572C > T | p.Gln858* |
| 20:32435286:GA:G | NA | frameshift | c.2576delA | p.Asn859fs |
| 20:32435288:AC:A | NA | frameshift | c.2577delC | p.Asn859fs |
| 20:32435289:CA:C | NA | frameshift | c.2578delA | p.Arg860fs |
| 20:32435289:CAG:C | rs1384553029 | frameshift | c.2580_2581 | p.Arg860fs |
| | | | delAG | |
| 20:32435290:A:T | NA | stop_gained | c.2578A > T | p.Arg860* |
| 20:32435292:AG:A | NA | frameshift | c.2581delG | p.Ala861fs |
| 20:32435293:GC:G | NA | frameshift | c.2582delC | p.Ala861fs |
| 20:32435294:C:CA | NA | frameshift | c.2583dupA | p.Phe862fs |
| 20:32435299:GA:G | NA | frameshift | c.2588delA | p.Asp863fs |
| 20:32435299:GATGACG | NA | frameshift | c.2588_2595 | p.Asp863fs |
| AA:G | | | delATGACGA | |
| | | | A | |
| 20:32435305:G:T | rs147895689 | stop_gained | c.2593G > T | p.Glu865* |
| 20:32435309:T:G | NA | stop_gained | c.2597T > G | p.Leu866* |
| 20:32435310:AG:A | NA | frameshift | c.2601delG | p.Gly869fs |
| 20:32435316:TG:T | NA | frameshift | c.2606delG | p.Gly869fs |
| 20:32435320:G:GGCTCA | NA | frameshift | c.2610_2655 | p.Lys886fs |
| TGCCCTCCTATGAGGGA | | | dupCTCATGC | |
| AAGTGATACTAGACAAG | | | CCTCCTATGA | |
| AAAACTT | | | GGGAAAGTG | |
| | | | ATACTAGAC | |
| | | | AAGAAAACT | |
| | | | TG | |
| 20:32435322:C:CCA | NA | frameshift | c.2610_2611 | p.Ser871fs |
| | | | insCA | |
| 20:32435324:CA:C | rs780091312 | frameshift | c.2613delA | p.Cys872fs |
| 20:32435327:G:GC | NA | frameshift | c.2618dupC | p.Pro874fs |
| 20:32435328:C:A | NA | stop_gained | c.2616C > A | p.Cys872* |
| 20:32435328:CCCTCCTA | NA | frameshift | c.2617_2626 | p.Pro873fs |
| TGA:C | | | delCCTCCTAT | |
| | | | GA | |
| 20:32435338:AG:A | NA | frameshift | c.2629delG | p.Glu877fs |
| 20:32435341:G:GA | NA | frameshift | c.2632dupA | p.Ser878fs |
| 20:32435341:GA:G | NA | frameshift | c.2632delA | p.Ser878fs |
| 20:32435344:AGT:A | NA | frameshift | c.2634_2635 | p.Ser878fs |
| | | | delTG | |
| 20:32435349:T:TA | NA | frameshift | c.2638dupA | p.Thr880fs |
| 20:32435350:AC:A | NA | frameshift | c.2639delC | p.Thr880fs |
| 20:32435356:C:T | rs770209084 | stop_gained | c.2644C > T | p.Gln882* |
| 20:32435363:AC:A | NA | frameshift | c.2652delC | p.Leu885fs |
| 20:32435366:T:A | NA | stop_gained | c.2654T > A | p.Leu885* |
| 20:32435368:A:T | NA | stop_gained | c.2656A > T | p.Lys886* |
| 20:32435374:A:T | NA | stop_gained | c.2662A > T | p.Lys888* |
| 20:32435375:A:AG | NA | frameshift | c.2665dupG | p.Ala889fs |
| 20:32435380:C:CT | rs1432318140 | frameshift | c.2669dupT | p.Val891fs |
| 20:32435385:TTC:T | NA | frameshift | c.2675_2676 | p.Ser892fs |
| | | | delCT | |
| 20:32435387:C:CT | NA | frameshift | c.2676dupT | p.Asn893fs |
| 20:32435390:AC:A | NA | frameshift | c.2679delC | p.Asn893fs |
| 20:32435393:GT:G | rs778535367 | frameshift | c.2683delT | p.Ser895fs |
| 20:32435395:T:TCTTTG | NA | frameshift | c.2685_2689 | p.His897fs |
| | | | dupTTTGC | |
| 20:32435395:TC:T | NA | frameshift | c.2684delC | p.Ser895fs |
| 20:32435396:C:CT | NA | frameshift | c.2687dupT | p.Leu896fs |
| 20:32435405:G:A | NA | stop_gained | c.2693G > A | p.Trp898* |
| 20:32435406:G:A | rs760592730 | stop_gained | c.2694G > A | p.Trp898* |
| 20:32435407:A:ATACCC | NA | frameshift | c.2696_2700 | p.Ile901fs |
| | | | dupTACCC | |
| 20:32435407:AT:A | NA | frameshift | c.2696delT | p.Ile899fs |
| 20:32435408:T:TA | NA | frameshift | c.2697dupA | p.Pro900fs |
| 20:32435409:A:AC | NA | frameshift | c.2700dupC | p.Ile901fs |
| 20:32435409:AC:A | NA | frameshift | c.2700delC | p.Ile901fs |
| 20:32435414:TC:T | NA | frameshift | c.2705delC | p.Pro902fs |
| 20:32435418:A:ATCAT | NA | frameshift | c.2708_2709 | p.Asn904fs |
| | | | insATTC | |
| 20:32435419:TCGAATG | NA | frameshift | c.2708_2714 | p.Ser903fs |
| A:T | | | delCGAATGA | |
| 20:32435421:GA:G | NA | frameshift | c.2711delA | p.Asn904fs |
| 20:32435428:GA:G | NA | frameshift | c.2717delA | p.Glu906fs |
| 20:32435436:G:GA | NA | frameshift | c.2727dupA | p.Gln910fs |
| 20:32435436:GAA:G | NA | frameshift | c.2726_2727 | p.Lys909fs |
| | | | delAA | |
| 20:32435440:C:T | NA | stop_gained | c.2728C > T | p.Gln910* |
| 20:32435452:G:T | NA | stop_gained | c.2740G > T | p.Glu914* |
| 20:32435458:A:AT | NA | frameshift | c.2746_2747 | p.Arg916fs |
| | | | insT | |
| 20:32435460:AG:A | NA | frameshift | c.2749delG | p.Glu917fs |
| 20:32435462:A:AAC | NA | frameshift | c.2754_2755 | p.Ile919fs |
| | | | dupCA | |
| 20:32435462:AAC:A | NA | frameshift | c.2754_2755 | p.Ile919fs |
| | | | delCA | |
| 20:32435464:CACAT:C | NA | frameshift | c.2755_2758 | p.Ile919fs |
| | | | delATAC | |
| 20:32435468:T:TA | rs771822198 | frameshift | c.2757dupA | p.Pro920fs |
| 20:32435474:C:CT | NA | frameshift | c.2763dupT | p.Val922fs |
| 20:32435478:TGAGCC:T | NA | frameshift | c.2767_2771 | p.Glu923fs |
| | | | delGAGCC | |
| 20:32435481:G:GC | NA | frameshift | c.2773dupC | p.Gln925fs |
| 20:32435481:GC:G | NA | frameshift | c.2773delC | p.Gln925fs |
| 20:32435483:C:CCCAG | NA | frameshift | c.2772_2775 | p.Val926fs |
| | | | dupCCAG | |
| 20:32435485:C:T | rs387907077 | stop_gained | c.2773C > T | p.Gln925* |
| 20:32435487:GGTTGGA | NA | frameshift | c.2777_2789 | p.Val926fs |
| GAGGAGT:G | | | delTTGGAGA | |
| | | | GGAGTG | |
| 20:32435490:TG:T | NA | frameshift | c.2780delG | p.Gly927fs |
| 20:32435493:A:AG | NA | frameshift | c.2782dupG | p.Glu928fs |
| 20:32435494:G:T | NA | stop_gained | c.2782G > T | p.Glu928* |
| 20:32435499:GTGGGAG | NA | frameshift | c.2790_2815 | p.Trp930fs |
| AAAGCTGCTCCCACCCCT | | | delGGAGAA | |
| CCG | | | AGCTGCTCC | |
| | | | CACCCCTCCT | |
| | | | G | |
| 20:32435501:G:A | NA | stop_gained | c.2789G > A | p.Trp930* |
| 20:32435503:G:T | NA | stop_gained | c.2791G > T | p.Glu931* |
| 20:32435505:GA:G | NA | frameshift | c.2796delA | p.Ala933fs |
| 20:32435505:GAAAGCT | NA | frameshift | c.2794_2803 | p.Lys932fs |
| GCTC:G | | | delAAAGCTG | |
| | | | CTC | |
| 20:32435510:C:CT | NA | frameshift | c.2799dupT | p.Ala934fs |
| 20:32435514:T:TCCCAC | NA | frameshift | c.2806_2810 | p.Ala939fs |
| | | | dupACCCC | |
| 20:32435518:A:AAG | NA | frameshift | c.2806_2807 | p.Thr936fs |
| | | | insAG | |
| 20:32435521:C:CT | NA | frameshift | c.2809_2810 | p.Pro937fs |
| | | | insT | |
| 20:32435521:CCTCCTGC | NA | frameshift | c.2810_2817 | p.Pro937fs |
| A:C | | | delCTCCTGC | |
| | | | A | |
| 20:32435522:C:CT | NA | frameshift | c.2811dupT | p.Pro938fs |
| 20:32435523:TC:T | NA | frameshift | c.2813delC | p.Pro938fs |
| 20:32435525:CTGCA:C | NA | frameshift | c.2815_2818 | p.Ala939fs |
| | | | delGCAT | |
| 20:32435528:CA:C | NA | frameshift | c.2817delA | p.Leu940fs |
| 20:32435529:AT:A | NA | frameshift | c.2819delT | p.Leu940fs |
| 20:32435529:ATT:A | NA | frameshift | c.2818_2819 | p.Leu940fs |
| | | | delTT | |
| 20:32435540:AT:A | NA | frameshift | c.2831delT | p.Leu944fs |
| 20:32435545:ACAGCTG | NA | frameshift | c.2834_2841 | p.Thr945fs |
| AG:A | | | delCAGCTGA | |
| | | | G | |
| 20:32435551:G:GAGGA | NA | frameshift | c.2840_2843 | p.Leu950fs |
| | | | dupAGGA | |
| 20:32435551:G:T | NA | stop_gained | c.2839G > T | p.Glu947* |
| 20:32435558:G:GTCTA | NA | frameshift | c.2847_2850 | p.Asp951fs |
| | | | dupTCTA | |
| 20:32435561:T:TA | NA | frameshift | c.2850dupA | p.Asp951fs |
| 20:32435569:C:CT | NA | frameshift | c.2859dupT | p.Asp954fs |
| 20:32435577:CCTTA:C | rs747315609 | frameshift | c.2869_2872 | p.Thr957fs |
| | | | delACTT | |
| 20:32435580:T:TA | NA | frameshift | c.2869dupA | p.Thr957fs |
| 20:32435581:AC:A | NA | frameshift | c.2870delC | p.Thr957fs |
| 20:32435582:C:CT | NA | frameshift | c.2872dupT | p.Ser958fs |
| 20:32435585:C:A | NA | stop_gained | c.2873C > A | p.Ser958* |
| 20:32435585:C:G | NA | stop_gained | c.2873C > G | p.Ser958* |
| 20:32435587:CT:C | NA | frameshift | c.2876delT | p.Leu959fs |
| 20:32435591:G:A | rs1438791925 | stop_gained | c.2879G > A | p.Trp960* |
| 20:32435592:G:A | rs756688220 | stop_gained | c.2880G > A | p.Trp960* |
| 20:32435595:TGTGCCAT | NA | frameshift | c.2885_2897 | p.Val962fs |
| CTCGAG:T | | | delTGCCATC | |
| | | | TCGAGG | |
| 20:32435596:GT:G | NA | frameshift | c.2885delT | p.Val962fs |
| 20:32435605:C:T | rs397515401 | stop_gained | c.2893C > T | p.Arg965* |
| 20:32435608:G:T | NA | stop_gained | c.2896G > T | p.Gly966* |
| 20:32435615:GT:G | NA | frameshift | c.2904delT | p.Ser968fs |
| 20:32435617:GA:G | NA | frameshift | c.2906delA | p.Asp969fs |
| 20:32435630:G:GT | NA | frameshift | c.2920dupT | p.Tyr974fs |
| 20:32435630:G:GTT | NA | frameshift | c.2919_2920 | p.Tyr974fs |
| | | | dupTT | |
| 20:32435632:T:TA | NA | frameshift | c.2921dupA | p.Tyr974fs |
| 20:32435633:AC:A | NA | frameshift | c.2922delC | p.Cys975fs |
| 20:32435634:C:A | rs886039722 | stop_gained | c.2922C > A | p.Tyr974* |
| 20:32435634:CT:C | NA | frameshift | c.2923delT | p.Cys975fs |
| 20:32435638:C:T | rs776868653 | stop_gained | c.2926C > T | p.Gln976* |
| 20:32435641:C:T | rs1366953593 | stop_gained | c.2929C > T | p.Gln977* |
| 20:32435649:C:CA | NA | frameshift | c.2938dupA | p.Ile980fs |
| 20:32435653:GA:G | NA | frameshift | c.2945delA | p.Lys982fs |
| 20:32435658:GCTGAAA | NA | frameshift | c.2949_2982 | p.Lys984fs |
| ATCAACGGAGACTCTGA | | | delGAAAATC | |
| AGCACTGAGTC:G | | | AACGGAGAC | |
| | | | TCTGAAGCA | |
| | | | CTGAGTCCT | |
| 20:32435666:TC:T | NA | frameshift | c.2955delC | p.Asn986fs |
| 20:32435667:CA:C | NA | frameshift | c.2957delA | p.Asn986fs |
| 20:32435669:AC:A | NA | frameshift | c.2958delC | p.Asn986fs |
| 20:32435670:C:CG | NA | frameshift | c.2960dupG | p.Asp988fs |
| 20:32435670:CG:C | NA | frameshift | c.2960delG | p.Gly987fs |
| 20:32435673:AGACTCT | NA | frameshift | c.2963_2987 | p.Asp988fs |
| GAAGCACTGAGTCCTCA | | | delACTCTGA | |
| CG:A | | | AGCACTGAG | |
| | | | TCCTCACGG | |
| 20:32435675:ACT:A | rs1064796772 | frameshift | c.2966_2967 | p.Ser989fs |
| | | | delCT | |
| 20:32435680:G:T | NA | stop_gained | c.2968G > T | p.Glu990* |
| 20:32435682:AGCACT:A | NA | frameshift | c.2972_2976 | p.Ala991fs |
| | | | delCACTG | |
| 20:32435683:GC:G | NA | frameshift | c.2972delC | p.Ala991fs |
| 20:32435684:CA:C | NA | frameshift | c.2973delA | p.Leu992fs |
| 20:32435689:A:AG | NA | frameshift | c.2978dupG | p.Ser993fs |
| 20:32435695:C:CA | NA | frameshift | c.2984dupA | p.His995fs |
| 20:32435696:ACGGT:A | NA | frameshift | c.2985_2988 | p.His995fs |
| | | | delCGGT | |
| 20:32435699:G:GT | NA | frameshift | c.2988dupT | p.Glu997fs |
| 20:32435701:G:T | NA | stop_gained | c.2989G > T | p.Glu997* |
| 20:32435710:GA:G | NA | frameshift | c.2999delA | p.Asp1000fs |
| 20:32435712:T:TA | NA | frameshift | c.3001dupA | p.Thr1001fs |
| 20:32435716:GC:G | NA | frameshift | c.3006delC | p.Ser1003fs |
| 20:32435717:CCT:C | NA | frameshift | c.3008_3009 | p.Ser1003fs |
| | | | delCT | |
| 20:32435724:C:CT | NA | frameshift | c.3015dupT | p.Glu1006fs |
| 20:32435724:CT:C | rs775709283 | frameshift | c.3015delT | p.Phe1005fs |
| 20:32435728:GA:G | NA | frameshift | c.3018delA | p.Gly1007fs |
| 20:32435731:G:GCA | NA | frameshift | c.3019_3020 | p.Gly1007fs |
| | | | insCA | |
| 20:32435731:GGT:G | NA | frameshift | c.3020_3021 | p.Gly1007fs |
| | | | delGT | |
| 20:32435739:C:CA | NA | frameshift | c.3028dupA | p.Thr1010fs |
| 20:32435742:G:GCTGTC | NA | frameshift | c.3030_3031 | p.Glu1011fs |
| CTCCGT | | | insCTGTCCTC | |
| | | | CGT | |
| 20:32435745:G:GGT | NA | frameshift | c.3034_3035 | p.Asp1012fs |
| | | | insTG | |
| 20:32435756:AG:A | NA | frameshift | c.3046delG | p.Ala1016fs |
| 20:32435761:G:GGT | NA | frameshift | c.3049_3050 | p.Asp1017fs |
| | | | insGT | |
| 20:32435763:C:CA | NA | frameshift | c.3052dupA | p.Thr1018fs |
| 20:32435764:A:AT | NA | frameshift | c.3052_3053 | p.Thr1018fs |
| | | | insT | |
| 20:32435765:CTA:C | NA | frameshift | c.3054_3055 | p.Glu1020fs |
| | | | delTA | |
| 20:32435767:A:T | NA | stop_gained | c.3055A > T | p.Arg1019* |
| 20:32435774:CT:C | NA | frameshift | c.3063delT | p.Ala1022fs |
| 20:32435780:TGACAAA | NA | frameshift | c.3074_3092 | p.Lys1025fs |
| GGGATCTTCGGTG:T | | | delAGGGATC | |
| | | | TTCGGTGGA | |
| | | | CAA | |
| 20:32435783:CA:C | NA | frameshift | c.3074delA | p.Lys1025fs |
| 20:32435790:AT:A | NA | frameshift | c.3079delT | p.Ser1027fs |
| 20:32435793:TTC:T | NA | frameshift | c.3082_3083 | p.Ser1028fs |
| | | | delTC | |
| 20:32435795:C:A | rs200702600 | stop_gained | c.3083C > A | p.Ser1028* |
| 20:32435796:G:GGTGG | NA | frameshift | c.3085_3125 | p.Leul043fs |
| ACAAGGATGAGAAACCC | | | dupGTGGAC | |
| AATTGGAACCAATCTGC | | | AAGGATGAG | |
| CCC | | | AAACCCAAT | |
| | | | TGGAACCAA | |
| | | | TCTGCCCC | |
| 20:32435808:TG:T | NA | frameshift | c.3097delG | p.Glu1033fs |
| 20:32435809:G:T | NA | stop_gained | c.3097G > T | p.Glu1033* |
| 20:32435810:AG:A | NA | frameshift | c.3099delG | p.Lys1034fs |
| 20:32435811:GA:G | NA | frameshift | c.3102delA | p.Lys1034fs |
| 20:32435812:A:AAACCC | NA | frameshift | c.3103_3140 | p.Gly1048fs |
| AATTGGAACCAATCTGC | | | dupCCCAATT | |
| CCCACTGTCCAAGGTG | | | GGAACCAAT | |
| | | | CTGCCCCACT | |
| | | | GTCCAAGGT | |
| | | | GAA | |
| 20:32435812:A:T | NA | stop_gained | c.3100A > T | p.Lys1034* |
| 20:32435819:AT:A | NA | frameshift | c.3109delT | p.Trp1037fs |
| 20:32435822:G:A | NA | stop_gained | c.3110G > A | p.Trp1037* |
| 20:32435823:G:A | NA | stop_gained | c.3111G > A | p.Trp1037* |
| 20:32435825:ACCAATCT | NA | frameshift | c.3117_3126 | p.Gln1039fs |
| GCC:A | | | delATCTGCC | |
| | | | CCA | |
| 20:32435827:C:T | rs1221031683 | stop_gained | c.3115C > T | p.Gln1039* |
| 20:32435833:GC:G | NA | frameshift | c.3125delC | p.Pro1042fs |
| 20:32435842:T:TC | NA | frameshift | c.3132dupC | p.Lys1045fs |
| 20:32435842:TC:T | NA | frameshift | c.3132delC | p.Lys1045fs |
| 20:32435844:CA:C | NA | frameshift | c.3134delA | p.Lys1045fs |
| 20:32435846:AG:A | NA | frameshift | c.3136delG | p.Val1046fs |
| 20:32435858:A:ACATG | NA | frameshift | c.3148_3151 | p.Arg1051fs |
| | | | dupATGC | |
| 20:32435867:T:TC | NA | frameshift | c.3155_3156 | p.Val1053fs |
| | | | insC | |
| 20:32435899:C:CA | NA | frameshift | c.3188dupA | p.Ser1064fs |
| 20:32435899:C:T | rs1311033207 | stop_gained | c.3187C > T | p.Gln1063* |
| 20:32435902:AGCTGG:A | NA | frameshift | c.3192_3196 | p.Trp1065fs |
| | | | delCTGGG | |
| 20:32435907:G:A | NA | stop_gained | c.3195G > A | p.Trp1065* |
| 20:32435910:GTC:G | NA | frameshift | c.3201_3202 | p.Arg1068fs |
| | | | delTC | |
| 20:32435914:C:T | rs764651405 | stop_gained | c.3202C > T | p.Arg1068* |
| 20:32436044:T:A | NA | stop_gained | c.3332T > A | p.Leu1111* |
| 20:32436053:GTAGCTT | NA | frameshift | c.3345_3355 | p.Ser1115fs |
| GCCCC:G | | | delCTTGCCC | |
| | | | CTAG | |
| 20:32436078:TCC:T | NA | frameshift | c.3367_3368 | p.Pro1123fs |
| | | | delCC | |
| 20:32436115:C:T | NA | stop_gained | c.3403C > T | p.Gln1135* |
| 20:32436130:A:T | NA | stop_gained | c.3418A > T | p.Lys1140* |
| 20:32436136:C:T | NA | stop_gained | c.3424C > T | p.Gln1142* |
| 20:32436137:A:AGAGCC | NA | frameshift | c.3433_3434 | p.Gly1145fs |
| ATGCGTAGC | | | insCGTAGCG | |
| | | | AGCCATG | |
| 20:32436188:GTGGCA: | NA | frameshift | c.3480_3484 | p.Met1161fs |
| G | | | delCATGG | |
| 20:32436208:AG:A | NA | frameshift | c.3497delG | p.Ser1166fs |
| 20:32436213:CA:C | NA | frameshift | c.3502delA | p.Ser1168fs |
| 20:32436215:GT:G | NA | frameshift | c.3505delT | p.Ser1169fs |
| 20:32436223:AG:A | NA | frameshift | c.3514delG | p.Ala1172fs |
| 20:32436258:T:A | NA | stop_gained | c.3546T > A | p.Cys1182* |
| 20:32436286:G:T | NA | stop_gained | c.3574G > T | p.Glu1192* |
| 20:32436295:C:T | NA | stop_gained | c.3583C > T | p.Gln1195* |
| 20:32436300:TC:T | NA | frameshift | c.3590delC | p.Pro1197fs |
| 20:32436303:T:TGGAGC | NA | frameshift | c.3592_3602 | p.Lys1202fs |
| ACCCCA | | | dupGGAGCA | |
| | | | CCCCA | |
| 20:32436305:GA:G | NA | frameshift | c.3594delA | p.Ala1199fs |
| 20:32436309:AC:A | NA | frameshift | c.3601delC | p.Gln1201fs |
| 20:32436344:A:ACTCC | NA | frameshift | c.3637_3640 | p.His1214fs |
| | | | dupCTCC | |
| 20:32436385:A:T | NA | stop_gained | c.3673A > T | p.Lys1225* |
| 20:32436397:ATGGATT | NA | frameshift | c.3686_3714 | p.Met1229fs |
| CCAAAGAGCAGTTTCTCTT | | | delTGGATTC | |
| CCTTT:A | | | CAAAGAGCA | |
| | | | GTTCTCTTCC | |
| 20:32436407:AAGAGC: | NA | frameshift | c.3698_3702 | p.Glu1233fs |
| A | | | delAGCAG | |
| 20:32436411:GCAGTTCT | NA | frameshift | c.3701_3711 | p.Gln1234fs |
| CTTC:G | | | delAGTTCTC | |
| | | | TTCC | |
| 20:32436412:C:T | NA | stop_gained | c.3700C > T | p.Gln1234* |
| 20:32436432:T:A | NA | stop_gained | c.3720T > A | p.Cys1240* |
| 20:32436439:C:T | NA | stop_gained | c.3727C > T | p.Gln1243* |
| 20:32436463:C:T | NA | stop_gained | c.3751C > T | p.Gln1251* |
| 20:32436497:GC:G | NA | frameshift | c.3788delC | p.Pro1263fs |
| 20:32436501:AG:A | NA | frameshift | c.3791delG | p.Gly1264fs |
| 20:32436508:CT:C | NA | frameshift | c.3798delT | p.Thr1267fs |
| 20:32436510:T:TA | rs1341638621 | frameshift | c.3799dupA | p.Thr1267fs |
| 20:32436523:A:AACGA | NA | frameshift | c.3811_3812 | p.Thr1271fs |
| GGTGTTCTCGAGGTAGT | | | insACGAGGT | |
| AAGAT | | | GTTCTCGAG | |
| | | | GTAGTAAGA | |
| | | | T | |
| 20:32436523:AC:A | NA | frameshift | c.3812delC | p.Thr1271fs |
| 20:32436527:CT:C | NA | frameshift | c.3816delT | p.Arg1273fs |
| 20:32436530:GT:G | NA | frameshift | c.3821delT | p.Phe1274fs |
| 20:32436536:C:G | NA | stop_gained | c.3824C > G | p.Ser1275* |
| 20:32436568:C:T | NA | stop_gained | c.3856C > T | p.Gln1286* |
| 20:32436573:AGGTC:A | NA | frameshift | c.3864_3867 | p.Arg1289fs |
| | | | delTCGG | |
| 20:32436580:GCC:G | NA | frameshift | c.3870_3871 | p.Leu1291fs |
| | | | delCC | |
| 20:32436582:CCT:C | NA | frameshift | c.3871_3872 | p.Leu1291fs |
| | | | delCT | |
| 20:32436584:TG:T | NA | frameshift | c.3875delG | p.Gly1292fs |
| 20:32436592:C:T | NA | stop_gained | c.3880C > T | p.Gln1294* |
| 20:32436610:C:T | NA | stop_gained | c.3898C > T | p.Gln1300* |
| 20:32436649:ACC:A | NA | frameshift | c.3939_3940 | p.Leu1314fs |
| | | | delCC | |
| 20:32436652:C:CT | NA | frameshift | c.3942dupT | p.Gln1315fs |
| 20:32436655:C:T | NA | stop_gained | c.3943C > T | p.Gln1315* |
| 20:32436656:AGCGCC:A | NA | frameshift | c.3945_3949 | p.Gln1315fs |
| | | | delGCGCC | |
| 20:32436674:A:AC | NA | frameshift | c.3965dupC | p.Met1323fs |
| 20:32436680:T:TA | NA | frameshift | c.3968_3969 | p.Met1323fs |
| | | | insA | |
| 20:32436681:G:GC | NA | frameshift | c.3971dupC | p.Leu1325fs |
| 20:32436727:G:T | NA | stop_gained | c.4015G > T | p.Gly1339* |
| 20:32436760:C:T | rs763386297 | stop_gained | c.4048C > T | p.Gln1350* |
| 20:32436764:C:CATGGA | NA | frameshift | c.4052_4053 | p.Pro1352fs |
| GT | | | insATGGAGT | |
| 20:32436772:G:T | NA | stop_gained | c.4060G > T | p.Glu1354* |
| 20:32436777:CTG:C | NA | frameshift | c.4066_4067 | p.Trp1356fs |
| | | | delTG | |
| 20:32436780:G:A | NA | stop_gained | c.4068G > A | p.Trp1356* |
| 20:32436795:T:TG | NA | frameshift | c.4084dupG | p.Ala1362fs |
| 20:32436820:G:T | NA | stop_gained | c.4108G > T | p.Glu1370* |
| 20:32436823:A:T | NA | stop_gained | c.4111A > T | p.Lys1371* |
| 20:32436833:T:TG | NA | frameshift | c.4127dupG | p.Pro1377fs |
| 20:32436833:TG:T | NA | frameshift | c.4127delG | p.Gly1376fs |
| 20:32436848:A:AG | NA | frameshift | c.4138dupG | p.Ala1380fs |
| 20:32436851:CAA:C | NA | frameshift | c.4141_4142 | p.Asn1381fs |
| | | | delAA | |
| 20:32436858:CGA:C | NA | frameshift | c.4149_4150 | p.Asn1384fs |
| | | | delGA | |
| 20:32436862:AACAGG: | NA | frameshift | c.4152_4156 | p.Asn1384fs |
| A | | | delCAGGA | |
| 20:32436884:GTCCCC:G | NA | frameshift | c.4174_4178 | p.Pro1392fs |
| | | | delCCCCT | |
| 20:32436885:TC:T | NA | frameshift | c.4177delC | p.Leu1393fs |
| 20:32436944:G:A | NA | stop_gained | c.4232G > A | p.Trp1411* |
| 20:32436944:G:GGA | NA | frameshift | c.4233_4234 | p.Lys1412fs |
| | | | dupGA | |
| 20:32436945:G:A | rs1l89588116 | stop_gained | c.4233G > A | p.Trp1411* |
| 20:32436948:ATT:A | NA | frameshift | c.4237_4238 | p.Leu1413fs |
| | | | delTT | |
| 20:32436949:T:TGGGG | NA | frameshift | c.4237_4238 | p.Leu1413fs |
| | | | insGGGG | |
| 20:32436950:T:G | NA | stop_gained | c.4238T > G | p.Leu1413* |
| 20:32436950:T:TA | NA | frameshift | c.4239dupA | p.Pro1414fs |
| 20:32436955:C:T | NA | stop_gained | c.4243C > T | p.Arg1415* |
| 20:32436977:G:GAGGC | NA | frameshift | c.4265_4266 | p.Ser1422fs |
| TCAC | | | insAGGCTCA | |
| | | | C | |
| 20:32436985:CTG:C | rs1463049576 | frameshift | c.4274_4275 | p.Leu1425fs |
| | | | delTG | |
| 20:32437024:C:T | NA | stop_gained | c.4312C > T | p.Gln1438* |
| 20:32437035:T:G | NA | stop_gained | c.4323T > G | p.Tyr1441* |
| 20:32437101:T:TC | NA | frameshift | c.4392dupC | p.Lys1465fs |
| 20:32437129:C:T | NA | stop_gained | c.4417C > T | p.Gln1473* |
| 20:32437240:C:CT | NA | frameshift | c.4529dupT | p.Lys1511fs |
| 20:32437256:TGTGCCA | NA | frameshift | c.4546_4552 | p.Cys1516fs |
| A:T | | | delTGCCAAG | |
| 20:32437257:GT:G | NA | frameshift | c.4546delT | p.Cys1516fs |
| 20:32437260:C:A | NA | stop_gained | c.4548OA | p.Cys1516* |
| 20:32437297:G:T | NA | stop_gained | c.4585G > T | p.Gly1529* |
| 20:32437323:C:A | NA | stop_gained | c.4611OA | p.Cys1537* |
| 20:32437329:GGT:G | NA | frameshift | c.4619_4620 | p.Val1540fs |
| | | | delTG | |

[0207] In some embodiments, the subject's burden of having any one or more somatic mutations in DNMT3A and/or ASXL1 can represent a weighted sum of a plurality of any of the DNMT3A and/or ASXL1 somatic mutations. In some embodiments, the burden is calculated using at least about 2, at least about 3, at least about 4, at least about 5, at least about 10, at least about 20, at least about 30, at least about 40, at least about 50, at least about 60, at least about 70, at least about 80, at least about 100, at least about 120, at least about 150, at least about 200, at least about 250, at least about 300, at least about 400, at least about 500, at least about 1,000, at least about 10,000, at least about 100,000, or at least about or more than 1,000,000 mutations present in or around (up to 10 Mb) the DNMT3A gene and/or the ASXL1 gene where the genetic burden is the number of mutations multiplied by the association estimate with lung cancer for each mutation (e.g., a weighted burden score). This can include any somatic mutations in proximity to the DNMT3A gene and/or the ASXL1 gene (up to 10 Mb around the gene) that show a non-zero association with lung cancer. In some embodiments, when the subject has a burden above a desired threshold score, the subject has an increased risk of developing lung cancer. In some embodiments, when the subject has a burden below a desired threshold score, the subject does not have an increased risk of developing lung cancer.

[0208] In some embodiments, the burden may be divided into quintiles, e.g., top quintile, intermediate quintile, and bottom quintile, wherein the bottom quintile of burden corresponds to the lowest risk group and the top quintile of burden corresponds to the highest risk group. In some embodiments, a subject having a greater burden comprises the highest weighted burdens, including, but not limited to the top 10%, top 20%, top 30%, top 40%, or top 50% of burdens from a subject population. In some embodiments, the somatic mutations comprise the somatic mutations having association with lung cancer in the top 10%, top 20%, top 30%, top 40%, or top 50% of p-value range for the association. In some embodiments, each of the identified somatic mutations comprise the somatic mutations having association with lung cancer with p-value of about 10⁻², about 10⁻³, about 10⁻⁴, about 10⁻⁵, about 10⁻⁶, about 10⁻⁷, about 10⁻⁸, about 10⁻⁹, about 10⁻¹⁰, about 10⁻¹¹, about 10⁻¹², about 10⁻¹³, about 10⁻¹⁴, or 10⁻¹⁵. In some embodiments, the identified somatic mutations comprise the somatic mutations having association with lung cancer with p-value of less than 5×10⁻⁸. In some embodiments, the identified somatic mutations comprise somatic mutations having association with lung cancer in high-risk subjects as compared to the rest of the reference population with odds ratio (OR) about 1.5 or greater, about 1.75 or greater, about 2.0 or greater, or about 2.25 or greater for the top 20% of the distribution; or about 1.5 or greater, about 1.75 or greater, about 2.0 or greater, about 2.25 or greater, about 2.5 or greater, or about 2.75 or greater. In some embodiments, the OR may range from about 1.0 to about 1.5, from about 1.5 to about 2.0, from about 2.0 to about 2.5, from about 2.5 to about 3.0, from about 3.0 to about 3.5, from about 3.5 to about 4.0, from about 4.0 to about 4.5, from about 4.5 to about 5.0, from about 5.0 to about 5.5, from about 5.5 to about 6.0, from about 6.0 to about 6.5, from about 6.5 to about 7.0, or greater than 7.0. In some embodiments, high-risk subjects comprise subjects having burdens in the top decile, quintile, or tertile in a reference population. The threshold of the burden is determined on the basis of the nature of the intended practical application and the risk difference that would be considered meaningful for that practical application.

[0209] In some embodiments, when a subject is identified as having an increased risk of developing lung cancer, the subject can undergo any of the procedures described herein related to lung cancer. In some embodiments, the gene burden can be replaced with a survival analysis whereby carriers of the somatic mutation(s) are examiner to determine whether they are more likely of less likely to develop lung cancer over time.

[0210] The gene burden analyses described herein can also be used as masks for screening a subject for the risk for developing any of the indications.

[0211] The present disclosure also provides methods of detecting the presence or absence of an LY75 variant nucleic acid molecule, a CD164 variant nucleic acid molecule, and/or a PARP1 variant nucleic acid molecule (i.e., a genomic nucleic acid molecule, an mRNA molecule, or a cDNA molecule produced from an mRNA molecule) in a biological sample from a subject. It is understood that gene sequences within a population and mRNA molecules encoded by such genes can vary due to polymorphisms such as single-nucleotide polymorphisms. The sequences provided herein for the LY75, CD164, and PARP1 variant genomic nucleic acid molecules, LY75, CD164, and PARP1 variant mRNA molecules, and LY75, CD164, and PARP1 variant cDNA molecules are only exemplary sequences. Other sequences for the LY75, CD164, and PARP1 variant genomic nucleic acid molecules, variant mRNA molecules, and variant cDNA molecules are also possible.

[0212] The biological sample can be derived from any cell, tissue, or biological fluid from the subject. The biological sample may comprise any clinically relevant tissue, such as a bone marrow sample, a tumor biopsy, a fine needle aspirate, or a sample of bodily fluid, such as blood, gingival crevicular fluid, plasma, serum, lymph, ascitic fluid, cystic fluid, or urine. In some cases, the sample comprises a buccal swab. The biological sample used in the methods disclosed herein can vary based on the assay format, nature of the detection method, and the tissues, cells, or extracts that are used as the sample. A biological sample can be processed differently depending on the assay being employed. For example, when detecting any an LY75 variant nucleic acid molecule, a CD164 variant nucleic acid molecule, and/or a PARP1 variant nucleic acid molecule, preliminary processing designed to isolate or enrich the biological sample for the genomic DNA can be employed. A variety of techniques may be used for this purpose. When detecting the level of any LY75, CD164, and/or PARP1 variant mRNA molecule, different techniques can be used enrich the biological sample with mRNA molecules. Various methods to detect the presence or level of an mRNA molecule or the presence of a particular variant genomic DNA locus can be used.

[0213] In some embodiments, detecting an LY75 predicted loss-of-function polypeptide in a subject comprises performing a sequence analysis on a biological sample obtained from the subject to determine whether an LY75 genomic nucleic acid molecule in the biological sample, and/or an LY75 mRNA molecule in the biological sample, and/or an LY75 cDNA molecule produced from an mRNA molecule in the biological sample, comprises one or more variations that cause a loss-of-function (partial or complete) or are predicted to cause a loss-of-function (partial or complete).

[0214] In some embodiments, detecting a CD164 variant nucleic acid molecule in a subject comprises performing a sequence analysis on a biological sample obtained from the subject to determine whether a CD164 genomic nucleic acid molecule in the biological sample, and/or a CD164 mRNA molecule in the biological sample, and/or a CD164 cDNA molecule produced from an mRNA molecule in the biological sample, comprises one or more variations that cause a loss-of-function (partial or complete) or are predicted to cause a loss-of-function (partial or complete).

[0215] In some embodiments, detecting a PARP1 variant nucleic acid molecule in a subject comprises performing a sequence analysis on a biological sample obtained from the subject to determine whether a PARP1 genomic nucleic acid molecule in the biological sample, and/or a PARP1 mRNA molecule in the biological sample, and/or a PARP1 cDNA molecule produced from an mRNA molecule in the biological sample, comprises one or more variations that cause a loss-of-function (partial or complete) or are predicted to cause a loss-of-function (partial or complete).

[0216] In some embodiments, the methods of detecting the presence or absence of an LY75 variant nucleic acid molecule (such as, for example, a genomic nucleic acid molecule, an mRNA molecule, and/or a cDNA molecule produced from an mRNA molecule) in a subject, comprise performing an assay on a biological sample obtained from the subject. The assay determines whether a nucleic acid molecule in the biological sample comprises a particular nucleotide sequence.

[0217] In some embodiments, the methods of detecting the presence or absence of a CD164 variant nucleic acid molecules (such as, for example, a genomic nucleic acid molecule, an mRNA molecule, and/or a cDNA molecule produced from an mRNA molecule) in a subject, comprise performing an assay on a biological sample obtained from the subject. The assay determines whether a nucleic acid molecule in the biological sample comprises a particular nucleotide sequence.

[0218] In some embodiments, the methods of detecting the presence or absence of a PARP1 variant nucleic acid molecule (such as, for example, a genomic nucleic acid molecule, an mRNA molecule, and/or a cDNA molecule produced from an mRNA molecule) in a subject, comprise performing an assay on a biological sample obtained from the subject. The assay determines whether a nucleic acid molecule in the biological sample comprises a particular nucleotide sequence.

[0219] In some embodiments, the biological sample comprises a cell or cell lysate. Such methods can further comprise, for example, obtaining a biological sample from the subject comprising an LY75 genomic nucleic acid molecule or mRNA molecule, a CD164 genomic nucleic acid molecule or mRNA molecule, and/or a PARP1 genomic nucleic acid molecule or mRNA molecule, and if mRNA, optionally reverse transcribing the mRNA into cDNA. Such assays can comprise, for example determining the identity of these positions of the particular LY75 nucleic acid molecule, particular CD164 nucleic acid molecule, and/or particular PARP1 nucleic acid molecule. In some embodiments, the method is an in vitro method.

[0220] In some embodiments, the determining step, detecting step, or sequence analysis comprises sequencing at least a portion of the nucleotide sequence of the LY75 genomic nucleic acid molecule, the LY75 mRNA molecule, or the LY75 cDNA molecule in the biological sample, wherein the sequenced portion comprises one or more variations that cause a loss-of-function (partial or complete) or are predicted to cause a loss-of-function (partial or complete).

[0221] In some embodiments, the determining step, detecting step, or sequence analysis comprises sequencing at least a portion of the nucleotide sequence of the CD164 genomic nucleic acid molecule, the CD164 mRNA molecule, or the CD164 cDNA molecule in the biological sample, wherein the sequenced portion comprises one or more variations that cause a loss-of-function (partial or complete) or are predicted to cause a loss-of-function (partial or complete).

[0222] In some embodiments, the determining step, detecting step, or sequence analysis comprises sequencing at least a portion of the nucleotide sequence of the PARP1 genomic nucleic acid molecule, the PARP1 mRNA molecule, or the PARP1 cDNA molecule in the biological sample, wherein the sequenced portion comprises one or more variations that cause a loss-of-function (partial or complete) or are predicted to cause a loss-of-function (partial or complete).

[0223] In some embodiments, the assay comprises sequencing the entire nucleic acid molecule. In some embodiments, only an LY75 genomic nucleic acid molecule is analyzed. In some embodiments, only an LY75 mRNA is analyzed. In some embodiments, only an LY75 cDNA obtained from LY75 mRNA is analyzed.

[0224] In some embodiments, the assay comprises sequencing the entire nucleic acid molecule. In some embodiments, only a CD164 genomic nucleic acid molecule is analyzed. In some embodiments, only a CD164 mRNA is analyzed. In some embodiments, only a CD164 cDNA obtained from CD164 mRNA is analyzed.

[0225] In some embodiments, the assay comprises sequencing the entire nucleic acid molecule. In some embodiments, only a PARP1 genomic nucleic acid molecule is analyzed. In some embodiments, only a PARP1 mRNA is analyzed. In some embodiments, only a PARP1 cDNA obtained from PARP1 mRNA is analyzed.

[0226] Alteration-specific polymerase chain reaction techniques can be used to detect mutations such as SNPs in a nucleic acid sequence. Alteration-specific primers can be used because the DNA polymerase will not extend when a mismatch with the template is present.

[0227] In some embodiments, the nucleic acid molecule in the sample is mRNA and the mRNA is reverse-transcribed into a cDNA prior to the amplifying step. In some embodiments, the nucleic acid molecule is present within a cell obtained from the subject.

[0228] In some embodiments, the assay comprises contacting the biological sample with a primer or probe, such as an alteration-specific primer or alteration-specific probe, that specifically hybridizes to an LY75 variant genomic sequence, variant mRNA sequence, or variant cDNA sequence and not the corresponding LY75 reference sequence under stringent conditions, and determining whether hybridization has occurred.

[0229] In some embodiments, the assay comprises contacting the biological sample with a primer or probe, such as an alteration-specific primer or alteration-specific probe, that specifically hybridizes to a CD164 variant genomic sequence, variant mRNA sequence, or variant cDNA sequence and not the corresponding CD164 reference sequence under stringent conditions, and determining whether hybridization has occurred.

[0230] In some embodiments, the assay comprises contacting the biological sample with a primer or probe, such as an alteration-specific primer or alteration-specific probe, that specifically hybridizes to a PARP1 variant genomic sequence, variant mRNA sequence, or variant cDNA sequence and not the corresponding PARP1 reference sequence under stringent conditions, and determining whether hybridization has occurred.

[0231] In some embodiments, the determining step, detecting step, or sequence analysis comprises: a) amplifying at least a portion of the nucleic acid molecule that encodes the LY75 polypeptide; b) labeling the amplified nucleic acid molecule with a detectable label; c) contacting the labeled nucleic acid molecule with a support comprising an alteration-specific probe; and d) detecting the detectable label.

[0232] In some embodiments, the determining step, detecting step, or sequence analysis comprises: a) amplifying at least a portion of the nucleic acid molecule that encodes the CD164 polypeptide; b) labeling the amplified nucleic acid molecule with a detectable label; c) contacting the labeled nucleic acid molecule with a support comprising an alteration-specific probe; and d) detecting the detectable label.

[0233] In some embodiments, the determining step, detecting step, or sequence analysis comprises: a) amplifying at least a portion of the nucleic acid molecule that encodes the PARP1 polypeptide; b) labeling the amplified nucleic acid molecule with a detectable label; c) contacting the labeled nucleic acid molecule with a support comprising an alteration-specific probe; and d) detecting the detectable label.

[0234] In some embodiments, the assay comprises RNA sequencing (RNA-Seq). In some embodiments, the assays also comprise reverse transcribing mRNA into cDNA, such as by the reverse transcriptase polymerase chain reaction (RT-PCR).

[0235] In some embodiments, the methods utilize probes and primers of sufficient nucleotide length to bind to the target nucleotide sequence and specifically detect and/or identify a polynucleotide comprising an LY75 variant genomic nucleic acid molecule, variant mRNA molecule, or variant cDNA molecule; a CD164 variant genomic nucleic acid molecule, variant mRNA molecule, or variant cDNA molecule; and/or a PARP1 variant genomic nucleic acid molecule, variant mRNA molecule, or variant cDNA molecule. The hybridization conditions or reaction conditions can be determined by the operator to achieve this result. The nucleotide length may be any length that is sufficient for use in a detection method of choice, including any assay described or exemplified herein. Such probes and primers can hybridize specifically to a target nucleotide sequence under high stringency hybridization conditions. Probes and primers may have complete nucleotide sequence identity of contiguous nucleotides within the target nucleotide sequence, although probes differing from the target nucleotide sequence and that retain the ability to specifically detect and/or identify a target nucleotide sequence may be designed by conventional methods. Probes and primers can have about 80%, about 85%, about 90%, about 91%, about 92%, about 93%, about 94%, about 95%, about 96%, about 97%, about 98%, about 99%, or 100% sequence identity or complementarity with the nucleotide sequence of the target nucleic acid molecule.

[0236] Illustrative examples of nucleic acid sequencing techniques include, but are not limited to, chain terminator (Sanger) sequencing and dye terminator sequencing. Other methods involve nucleic acid hybridization methods other than sequencing, including using labeled primers or probes directed against purified DNA, amplified DNA, and fixed cell preparations (fluorescence in situ hybridization (FISH)). In some methods, a target nucleic acid molecule may be amplified prior to or simultaneous with detection. Illustrative examples of nucleic acid amplification techniques include, but are not limited to, polymerase chain reaction (PCR), ligase chain reaction (LCR), strand displacement amplification (SDA), and nucleic acid sequence based amplification (NASBA). Other methods include, but are not limited to, ligase chain reaction, strand displacement amplification, and thermophilic SDA (tSDA).

[0237] In hybridization techniques, stringent conditions can be employed such that a probe or primer will specifically hybridize to its target. In some embodiments, a polynucleotide primer or probe under stringent conditions will hybridize to its target sequence to a detectably greater degree than to other non-target sequences, such as, at least 2-fold, at least 3-fold, at least 4-fold, or more over background, including over 10-fold over background. In some embodiments, a polynucleotide primer or probe under stringent conditions will hybridize to its target nucleotide sequence to a detectably greater degree than to other nucleotide sequences by at least 2-fold. In some embodiments, a polynucleotide primer or probe under stringent conditions will hybridize to its target nucleotide sequence to a detectably greater degree than to other nucleotide sequences by at least 3-fold. In some embodiments, a polynucleotide primer or probe under stringent conditions will hybridize to its target nucleotide sequence to a detectably greater degree than to other nucleotide sequences by at least 4-fold. In some embodiments, a polynucleotide primer or probe under stringent conditions will hybridize to its target nucleotide sequence to a detectably greater degree than to other nucleotide sequences by over 10-fold over background. Stringent conditions are sequence-dependent and will be different in different circumstances.

[0238] Appropriate stringency conditions which promote DNA hybridization, for example, 6× sodium chloride/sodium citrate (SSC) at about 45° C., followed by a wash of 2×SSC at 50° C., are known or can be found in Current Protocols in Molecular Biology, John Wiley & Sons, N.Y. (1989), 6.3.1-6.3.6. Typically, stringent conditions for hybridization and detection will be those in which the salt concentration is less than about 1.5 M Na⁺ ion, typically about 0.01 to 1.0 M Na⁺ ion concentration (or other salts) at pH 7.0 to 8.3 and the temperature is at least about 30° C. for short probes (such as, for example, 10 to 50 nucleotides) and at least about 60° C. for longer probes (such as, for example, greater than 50 nucleotides). Stringent conditions may also be achieved with the addition of destabilizing agents such as formamide. Optionally, wash buffers may comprise about 0.1% to about 1% SDS. Duration of hybridization is generally less than about 24 hours, usually about 4 to about 12 hours. The duration of the wash time will be at least a length of time sufficient to reach equilibrium.

[0239] In some embodiments, such isolated nucleic acid molecules comprise or consist of at least about 5, at least about 8, at least about 10, at least about 11, at least about 12, at least about 13, at least about 14, at least about 15, at least about 16, at least about 17, at least about 18, at least about 19, at least about 20, at least about 21, at least about 22, at least about 23, at least about 24, at least about 25, at least about 30, at least about 35, at least about 40, at least about 45, at least about 50, at least about 55, at least about 60, at least about 65, at least about 70, at least about 75, at least about 80, at least about 85, at least about 90, at least about 95, at least about 100, at least about 200, at least about 300, at least about 400, at least about 500, at least about 600, at least about 700, at least about 800, at least about 900, at least about 1000, at least about 2000, at least about 3000, at least about 4000, or at least about 5000 nucleotides. In some embodiments, such isolated nucleic acid molecules comprise or consist of at least about 5, at least about 8, at least about 10, at least about 11, at least about 12, at least about 13, at least about 14, at least about 15, at least about 16, at least about 17, at least about 18, at least about 19, at least about 20, at least about 21, at least about 22, at least about 23, at least about 24, or at least about 25 nucleotides. In some embodiments, the isolated nucleic acid molecules comprise or consist of at least about 18 nucleotides. In some embodiments, the isolated nucleic acid molecules comprise or consists of at least about 15 nucleotides. In some embodiments, the isolated nucleic acid molecules consist of or comprise from about 10 to about 35, from about 10 to about 30, from about 10 to about 25, from about 12 to about 30, from about 12 to about 28, from about 12 to about 24, from about 15 to about 30, from about 15 to about 25, from about 18 to about 30, from about 18 to about 25, from about 18 to about 24, or from about 18 to about 22 nucleotides. In some embodiments, the isolated nucleic acid molecules consist of or comprise from about 18 to about 30 nucleotides. In some embodiments, the isolated nucleic acid molecules comprise or consist of at least about 15 nucleotides to at least about 35 nucleotides.

[0240] In some embodiments, such isolated nucleic acid molecules hybridize to LY75 variant nucleic acid molecules (such as genomic nucleic acid molecules, mRNA molecules, and/or cDNA molecules) under stringent conditions. Such nucleic acid molecules can be used, for example, as probes, primers, alteration-specific probes, or alteration-specific primers as described or exemplified herein, and include, without limitation primers, probes, antisense RNAs, shRNAs, and siRNAs, each of which is described in more detail elsewhere herein, and can be used in any of the methods described herein.

[0241] In some embodiments, such isolated nucleic acid molecules hybridize to CD164 variant nucleic acid molecules (such as genomic nucleic acid molecules, mRNA molecules, and/or cDNA molecules) under stringent conditions. Such nucleic acid molecules can be used, for example, as probes, primers, alteration-specific probes, or alteration-specific primers as described or exemplified herein, and include, without limitation primers, probes, antisense RNAs, shRNAs, and siRNAs, each of which is described in more detail elsewhere herein, and can be used in any of the methods described herein.

[0242] In some embodiments, such isolated nucleic acid molecules hybridize to PARP1 variant nucleic acid molecules (such as genomic nucleic acid molecules, mRNA molecules, and/or cDNA molecules) under stringent conditions. Such nucleic acid molecules can be used, for example, as probes, primers, alteration-specific probes, or alteration-specific primers as described or exemplified herein, and include, without limitation primers, probes, antisense RNAs, shRNAs, and siRNAs, each of which is described in more detail elsewhere herein, and can be used in any of the methods described herein.

[0243] In some embodiments, the isolated nucleic acid molecules hybridize to at least about 15 contiguous nucleotides of a nucleic acid molecule that is at least about 70%, at least about 75%, at least about 80%, at least about 85%, at least about 90%, at least about 95%, at least about 96%, at least about 97%, at least about 98%, at least about 99%, or 100% identical to LY75 variant genomic nucleic acid molecules, LY75 variant mRNA molecules, and/or LY75 variant cDNA molecules. In some embodiments, the isolated nucleic acid molecules consist of or comprise from about 15 to about 100 nucleotides, or from about 15 to about 35 nucleotides. In some embodiments, the isolated nucleic acid molecules consist of or comprise from about 15 to about 100 nucleotides. In some embodiments, the isolated nucleic acid molecules consist of or comprise from about 15 to about 35 nucleotides.

[0244] In some embodiments, the isolated nucleic acid molecules hybridize to at least about 15 contiguous nucleotides of a nucleic acid molecule that is at least about 70%, at least about 75%, at least about 80%, at least about 85%, at least about 90%, at least about 95%, at least about 96%, at least about 97%, at least about 98%, at least about 99%, or 100% identical to CD164 variant genomic nucleic acid molecules, CD164 variant mRNA molecules, and/or CD164 variant cDNA molecules. In some embodiments, the isolated nucleic acid molecules consist of or comprise from about 15 to about 100 nucleotides, or from about 15 to about 35 nucleotides. In some embodiments, the isolated nucleic acid molecules consist of or comprise from about 15 to about 100 nucleotides. In some embodiments, the isolated nucleic acid molecules consist of or comprise from about 15 to about 35 nucleotides.

[0245] In some embodiments, the isolated nucleic acid molecules hybridize to at least about 15 contiguous nucleotides of a nucleic acid molecule that is at least about 70%, at least about 75%, at least about 80%, at least about 85%, at least about 90%, at least about 95%, at least about 96%, at least about 97%, at least about 98%, at least about 99%, or 100% identical to PARP1 variant genomic nucleic acid molecules, PARP1 variant mRNA molecules, and/or PARP1 variant cDNA molecules. In some embodiments, the isolated nucleic acid molecules consist of or comprise from about 15 to about 100 nucleotides, or from about 15 to about 35 nucleotides. In some embodiments, the isolated nucleic acid molecules consist of or comprise from about 15 to about 100 nucleotides. In some embodiments, the isolated nucleic acid molecules consist of or comprise from about 15 to about 35 nucleotides.

[0246] In some embodiments, the alteration-specific probes and alteration-specific primers comprise DNA. In some embodiments, the alteration-specific probes and alteration-specific primers comprise RNA.

[0247] In some embodiments, the probes and primers described herein (including alteration-specific probes and alteration-specific primers) have a nucleotide sequence that specifically hybridizes to any of the nucleic acid molecules disclosed herein, or the complement thereof. In some embodiments, the probes and primers specifically hybridize to any of the nucleic acid molecules disclosed herein under stringent conditions.

[0248] In some embodiments, the primers, including alteration-specific primers, can be used in second generation sequencing or high throughput sequencing. In some instances, the primers, including alteration-specific primers, can be modified. In particular, the primers can comprise various modifications that are used at different steps of, for example, Massive Parallel Signature Sequencing (MPSS), Polony sequencing, and 454 Pyrosequencing. Modified primers can be used at several steps of the process, including biotinylated primers in the cloning step and fluorescently labeled primers used at the bead loading step and detection step. Polony sequencing is generally performed using a paired-end tags library wherein each molecule of DNA template is about 135 bp in length. Biotinylated primers are used at the bead loading step and emulsion PCR. Fluorescently labeled degenerate nonamer oligonucleotides are used at the detection step. An adaptor can contain a 5′-biotin tag for immobilization of the DNA library onto streptavidin-coated beads.

[0249] The probes and primers described herein can be used to detect a nucleotide variation within any of the LY75 variant genomic nucleic acid molecules, LY75 variant mRNA molecules, and/or LY75 variant cDNA molecules disclosed herein. The primers described herein can be used to amplify LY75 variant genomic nucleic acid molecules, LY75 variant mRNA molecules, or LY75 variant cDNA molecules, or a fragment thereof.

[0250] The probes and primers described herein can also be used to detect a nucleotide variation within any of the CD164 variant genomic nucleic acid molecules, CD164 variant mRNA molecules, and/or CD164 variant cDNA molecules disclosed herein. The primers described herein can be used to amplify CD164 variant genomic nucleic acid molecules, CD164 variant mRNA molecules, or CD164 variant cDNA molecules, or a fragment thereof.

[0251] The probes and primers described herein can also be used to detect a nucleotide variation within any of the PARP1 variant genomic nucleic acid molecules, PARP1 variant mRNA molecules, and/or PARP1 variant cDNA molecules disclosed herein. The primers described herein can be used to amplify CD164 variant genomic nucleic acid molecules, PARP1 variant mRNA molecules, or PARP1 variant cDNA molecules, or a fragment thereof.

[0252] In the context of the disclosure “specifically hybridizes” means that the probe or primer (such as, for example, the alteration-specific probe or alteration-specific primer) does not hybridize to a nucleic acid sequence encoding an LY75 reference genomic nucleic acid molecule, a CD164 reference genomic nucleic acid molecule, a PARP1 reference genomic nucleic acid molecule, an LY75 reference mRNA molecule, or a CD164 reference mRNA molecule, a PARP1 reference mRNA molecule, an LY75 reference cDNA molecule, a CD164 reference cDNA molecule, and/or PARP reference cDNA molecule.

[0253] In some embodiments, the probes (such as, for example, an alteration-specific probe) comprise a label. In some embodiments, the label is a fluorescent label, a radiolabel, or biotin.

[0254] The present disclosure also provides supports comprising a substrate to which any one or more of the probes disclosed herein is attached. Solid supports are solid-state substrates or supports with which molecules, such as any of the probes disclosed herein, can be associated. A form of solid support is an array. Another form of solid support is an array detector. An array detector is a solid support to which multiple different probes have been coupled in an array, grid, or other organized pattern. A form for a solid-state substrate is a microtiter dish, such as a standard 96-well type. In some embodiments, a multiwell glass slide can be employed that normally contains one array per well.

[0255] The nucleotide sequence of an LY75 reference genomic nucleic acid molecule is set forth in SEQ ID NO:1 (ENSG00000054219.11 encompassing chr2:159,803,355-159,904,756 in the GRCh38/hg38 human genome assembly). The nucleotide sequence of an LY75 variant genomic nucleic acid molecule is set forth in SEQ ID NO:2 (r578446341; C70,612T; codon 70,611-70,613 CCG to CTG; 101,402 bp). In some embodiments, an LY75 variant genomic nucleic acid molecule is rs147820690 comprising a C>T variation at position chr2:159878663 (GRCh38.p13; NC_000002.12: g.159878663C>T).

[0256] The nucleotide sequence of an LY75 reference mRNA molecule is set forth in SEQ ID NO:3 (NM_002349.4; Isoform 1; 6,932 nt; LY75 Segment). The nucleotide sequence of another LY75 reference mRNA molecule is set forth in SEQ ID NO:4 (ENST00000504764.5; Isoform 2; 5,650 nt; LY75-CD302). The nucleotide sequence of another LY75 reference mRNA molecule is set forth in SEQ ID NO:5 (ENST00000505052.1; Isoform 3; 5,482 nt; LY75-CD302). The nucleotide sequence of another LY75 reference mRNA molecule is set forth in SEQ ID NO:6 (NM_001198759.1; Isoform 4; 8,919 nt; LY75-CD302). The nucleotide sequence of another LY75 reference mRNA molecule is set forth in SEQ ID NO:7 (NM_001198760.1; Isoform 5; 8,751 nt; LY75-CD302). The nucleotide sequence of another LY75 reference mRNA molecule is set forth in SEQ ID NO:8 (AY184222.1; Isoform 6; 5,622 nt; LY75-CD302). The nucleotide sequence of another LY75 reference mRNA molecule is set forth in SEQ ID NO:9 (AY314006.1; Isoform 7; 5,454 nt; LY75-CD302). The nucleotide sequence of another LY75 reference mRNA molecule is set forth in SEQ ID NO:10 (A13208915.1; Isoform 8; 5,713 nt; LY75-Segment). The nucleotide sequence of another LY75 reference mRNA molecule is set forth in SEQ ID NO:11 (AF011333.1; Isoform 9; 6,928 nt; LY75-Segment). The nucleotide sequence of another LY75 reference mRNA molecule is set forth in SEQ ID NO:12 (AF064827.1; Isoform 10; 5,169 nt; LY75-Segment). The nucleotide sequence of another LY75 reference mRNA molecule is set forth in SEQ ID NO:13 (ENST00000263636.4; Isoform 11; 6,886 nt; LY75-Segment).

[0257] The nucleotide sequence of an LY75 variant mRNA molecule is set forth in SEQ ID NO:14 (NM_002349.4; Isoform 1; r578446341; C3,814T; Codon 3,813-3,815 CCG to CUG; 6,932 nt; LY75 Segment). The nucleotide sequence of another LY75 variant mRNA molecule is set forth in SEQ ID NO:15 (ENST00000504764.5; Isoform 2; r578446341; C3,768T; Codon 3,767-3,769 CCG to CUG; 5,650 nt; LY75-CD302). The nucleotide sequence of another LY75 variant mRNA molecule is set forth in SEQ ID NO:16 (ENST00000505052.1; Isoform 3; r578446341; C3,768T; Codon 3,767-3,769 CCG to CUG; 5,482 nt; LY75-CD302). The nucleotide sequence of another LY75 variant mRNA molecule is set forth in SEQ ID NO:17 (NM_001198759.1; Isoform 4; r578446341; C3,814T; Codon 3,813-3,815 CCG to CUG; 8,919 nt; LY75-CD302). The nucleotide sequence of another LY75 variant mRNA molecule is set forth in SEQ ID NO:18 (NM_001198760.1; Isoform 5; r578446341; C3,814T; Codon 3,813-3,815 CCG to CUG; 8,751 nt; LY75-CD302). The nucleotide sequence of another LY75 variant mRNA molecule is set forth in SEQ ID N0:19 (AY184222.1; Isoform 6; r578446341; C3,740T; Codon 3,739-3,741 CCG to CUG; 5,622 nt; LY75-CD302). The nucleotide sequence of another LY75 variant mRNA molecule is set forth in SEQ ID NO:20 (AY314006.1; Isoform 7; r578446341; C3,740T; Codon 3,739-3,741 CCG to CUG; 5,454 nt; LY75-CD302). The nucleotide sequence of another LY75 variant mRNA molecule is set forth in SEQ ID NO:21 (AB208915.1; Isoform 8; C2,594T; Codon 2,593-2,595 CCG to CUG; 5,713 nt; LY75-Segment). The nucleotide sequence of another LY75 variant mRNA molecule is set forth in SEQ ID NO:22 (AF011333.1; Isoform 9; C3,793T; Codon 3,792-3,794 CCG to CUG; 6,928 nt; LY75-Segment). The nucleotide sequence of another LY75 variant mRNA molecule is set forth in SEQ ID NO:23 (AF064827.1; Isoform 10; C3,740T; Codon 3,739-3,741 CCG to CUG; 5,169 nt; LY75-Segment). The nucleotide sequence of another LY75 variant mRNA molecule is set forth in SEQ ID NO:24 (ENST00000263636.4; Isoform 11; C3,768T; Codon 3,767-3,769 CCG to CUG; 6,886 nt; LY75-Segment). In some embodiments, an LY75 variant mRNA molecule is any of the mRNA molecule isoforms described above produced from the LY75 variant genomic nucleic acid molecule rs147820690 comprising a C>T variation at position chr2:159878663 (GRCh38.p13; NC_000002.12: g.159878663C>T).

[0258] The nucleotide sequence of an LY75 reference cDNA molecule is set forth in SEQ ID NO:25. The nucleotide sequence of another LY75 reference cDNA molecule is set forth in SEQ ID NO:26. The nucleotide sequence of another LY75 reference cDNA molecule is set forth in SEQ ID NO:27. The nucleotide sequence of another LY75 reference cDNA molecule is set forth in SEQ ID NO:28. The nucleotide sequence of another LY75 reference cDNA molecule is set forth in SEQ ID NO:29. The nucleotide sequence of another LY75 reference cDNA molecule is set forth in SEQ ID NO:30. The nucleotide sequence of another LY75 reference cDNA molecule is set forth in SEQ ID NO:31. The nucleotide sequence of another LY75 reference cDNA molecule is set forth in SEQ ID NO:32. The nucleotide sequence of another LY75 reference cDNA molecule is set forth in SEQ ID NO:33. The nucleotide sequence of another LY75 reference cDNA molecule is set forth in SEQ ID NO:34. The nucleotide sequence of another LY75 reference cDNA molecule is set forth in SEQ ID NO:35.

[0259] The nucleotide sequence of an LY75 variant cDNA molecule is set forth in SEQ ID NO:36. The nucleotide sequence of another LY75 variant cDNA molecule is set forth in SEQ ID NO:37. The nucleotide sequence of another LY75 variant cDNA molecule is set forth in SEQ ID NO:38. The nucleotide sequence of another LY75 variant cDNA molecule is set forth in SEQ ID NO:39. The nucleotide sequence of another LY75 variant cDNA molecule is set forth in SEQ ID NO:40. The nucleotide sequence of another LY75 variant cDNA molecule is set forth in SEQ ID NO:41. The nucleotide sequence of another LY75 variant cDNA molecule is set forth in SEQ ID NO:42. The nucleotide sequence of another LY75 variant cDNA molecule is set forth in SEQ ID NO:43. The nucleotide sequence of another LY75 variant cDNA molecule is set forth in SEQ ID NO:44. The nucleotide sequence of another LY75 variant cDNA molecule is set forth in SEQ ID NO:45. The nucleotide sequence of another LY75 variant cDNA molecule is set forth in SEQ ID NO:46. In some embodiments, an LY75 variant cDNA molecule is any cDNA molecule produced from any mRNA isoform molecule produced from the LY75 variant genomic nucleic acid molecule rs147820690 comprising a C>T variation at position chr2:159878663 (GRCh38.p13; NC_000002.12: g.159878663C>T).

[0260] The amino acid sequence of an LY75 reference polypeptide is set forth in SEQ ID NO:47 (Isoform 1; AAC17636.1) and is 1,722 amino acids in length. The amino acid sequence of another LY75 reference polypeptide is set forth in SEQ ID NO:48 (Isoform 2; NP_001185688.1) and is 1,873 amino acids in length. The amino acid sequence of another LY75 reference polypeptide is set forth in SEQ ID NO:49 (Isoform 3; NP_001185689.1) and is 1,817 amino acids in length. The amino acid sequence of another LY75 reference polypeptide is set forth in SEQ ID NO:50 (Isoform 4; BAD92152.1) and is 1,340 amino acids in length.

[0261] The amino acid sequence of an LY75 variant polypeptide is set forth in SEQ ID NO:51 (Isoform 1; AAC17636.1; Pro1,247Leu) and is 1,722 amino acids in length. The amino acid sequence of another LY75 variant polypeptide is set forth in SEQ ID NO:52 (Isoform 2; NP_001185688.1; Pro1,247Leu) and is 1,873 amino acids in length. The amino acid sequence of another LY75 variant polypeptide is set forth in SEQ ID NO:53 (Isoform 3; NP_001185689.1; Pro1,247Leu) and is 1,817 amino acids in length. The amino acid sequence of another LY75 variant polypeptide is set forth in SEQ ID NO:54 (Isoform 4; BAD92152.1; Pro865Leu) and is 1,340 amino acids in length. In some embodiments, an LY75 variant polypeptide is G525E produced from the LY75 variant genomic nucleic acid molecule rs147820690 comprising a C>T variation at position chr2:159878663 (GRCh38.p13; NC_000002.12: g.159878663C>T).

[0262] The nucleotide sequence of a CD164 reference genomic nucleic acid molecule is set forth in SEQ ID NO:55 (ENSG00000135535.1 encompassing chr6:109,366,514-109,381,739 in the GRCh38/hg38 human genome assembly). The nucleotide sequence of a CD164 variant genomic nucleic acid molecule is set forth in SEQ ID NO:56 (r53799840; T297A; 15,226 bp).

[0263] The nucleotide sequence of a CD164 reference mRNA molecule is set forth in SEQ ID NO:57 (NM_001346500; Isoform 1; 2,992 nt). The nucleotide sequence of another CD164 reference mRNA molecule is set forth in SEQ ID NO:58 (ENST00000413644.6; Isoform 2; 2,414 nt). The nucleotide sequence of another CD164 reference mRNA molecule is set forth in SEQ ID NO:59 (NM_006016.6; Isoform; 3 3,020 nt). The nucleotide sequence of another CD164 reference mRNA molecule is set forth in SEQ ID NO:60 (ENST00000275080.11; Isoform 4; 2,954 nt). The nucleotide sequence of another CD164 reference mRNA molecule is set forth in SEQ ID NO:61 (ENST00000324953.9; Isoform 5; 2,936 nt). The nucleotide sequence of another CD164 reference mRNA molecule is set forth in SEQ ID NO:62 (ENST00000512821.5; Isoform 6; 964 nt). The nucleotide sequence of another CD164 reference mRNA molecule is set forth in SEQ ID NO:63 (NM_001142403.3; Isoform 7; 2,424 nt). The nucleotide sequence of another CD164 reference mRNA molecule is set forth in SEQ ID NO:64 (NM_001142402.3; Isoform 8; 2,963 nt). The nucleotide sequence of another CD164 reference mRNA molecule is set forth in SEQ ID NO:65 (NM_001142401.3; Isoform 9; 2,981 nt). The nucleotide sequence of another CD164 reference mRNA molecule is set forth in SEQ ID NO:66 (D14043.1; Isoform 10; 2,427 nt). The nucleotide sequence of another CD164 reference mRNA molecule is set forth in SEQ ID NO:67 (AF299341.1; Isoform 11; 2,929 nt). The nucleotide sequence of another CD164 reference mRNA molecule is set forth in SEQ ID NO:68 (AF299342.1; Isoform 12; 2,950 nt). The nucleotide sequence of another CD164 reference mRNA molecule is set forth in SEQ ID NO:69 (AF299343.1; Isoform 13; 2,968 nt). The nucleotide sequence of another CD164 reference mRNA molecule is set forth in SEQ ID NO:70 (BC011522.3; Isoform 14; 3,010 nt). The nucleotide sequence of another CD164 reference mRNA molecule is set forth in SEQ ID NO:71 (AK301692.1; Isoform 15; 1,294 nt). The nucleotide sequence of another CD164 reference mRNA molecule is set forth in SEQ ID NO:72 (AK303525.1; Isoform 16; 1,386 nt). The nucleotide sequence of another CD164 reference mRNA molecule is set forth in SEQ ID NO:73 (AK315908.1; Isoform 17; 1,386 nt). The nucleotide sequence of another CD164 reference mRNA molecule is set forth in SEQ ID NO:74 (AF106518.1; Isoform; 18 537 nt). The nucleotide sequence of another CD164 reference mRNA molecule is set forth in SEQ ID NO:75 (AF263279.1; Isoform 19; 594 nt). The nucleotide sequence of another CD164 reference mRNA molecule is set forth in SEQ ID NO:76 (FJ200494.1; Isoform 20; 590 nt). The nucleotide sequence of another CD164 reference mRNA molecule is set forth in SEQ ID NO:77 (AK312357.1; Isoform 21; 683 nt). The nucleotide sequence of another CD164 reference mRNA molecule is set forth in SEQ ID NO:78 (ENST00000368961.6; Isoform 22; 3,106 nt). The nucleotide sequence of another CD164 reference mRNA molecule is set forth in SEQ ID NO:79 (ENST00000310786.5; Isoform 23; 2,993 nt). The nucleotide sequence of another CD164 reference mRNA molecule is set forth in SEQ ID NO:80 (ENST00000504373.1; Isoform 24; 1,402 nt).

[0264] The nucleotide sequence of a CD164 reference cDNA molecule is set forth in SEQ ID NO:81. The nucleotide sequence of another CD164 reference cDNA molecule is set forth in SEQ ID NO:82. The nucleotide sequence of another CD164 reference cDNA molecule is set forth in SEQ ID NO:83 The nucleotide sequence of another CD164 reference cDNA molecule is set forth in SEQ ID NO:84. The nucleotide sequence of another CD164 reference cDNA molecule is set forth in SEQ ID NO:85. The nucleotide sequence of another CD164 reference cDNA molecule is set forth in SEQ ID NO:86. The nucleotide sequence of another CD164 reference cDNA molecule is set forth in SEQ ID NO:87. The nucleotide sequence of another CD164 reference cDNA molecule is set forth in SEQ ID NO:88. The nucleotide sequence of another CD164 reference cDNA molecule is set forth in SEQ ID NO:89. The nucleotide sequence of another CD164 reference cDNA molecule is set forth in SEQ ID NO:90. The nucleotide sequence of another CD164 reference cDNA molecule is set forth in SEQ ID NO:91. The nucleotide sequence of another CD164 reference cDNA molecule is set forth in SEQ ID NO:92. The nucleotide sequence of another CD164 reference cDNA molecule is set forth in SEQ ID NO:93. The nucleotide sequence of another CD164 reference cDNA molecule is set forth in SEQ ID NO:94. The nucleotide sequence of another CD164 reference cDNA molecule is set forth in SEQ ID NO:95. The nucleotide sequence of another CD164 reference cDNA molecule is set forth in SEQ ID NO:96. The nucleotide sequence of another CD164 reference cDNA molecule is set forth in SEQ ID NO:97. The nucleotide sequence of another CD164 reference cDNA molecule is set forth in SEQ ID NO:98. The nucleotide sequence of another CD164 reference cDNA molecule is set forth in SEQ ID NO:99. The nucleotide sequence of another CD164 reference cDNA molecule is set forth in SEQ ID NO:100. The nucleotide sequence of another CD164 reference cDNA molecule is set forth in SEQ ID NO:101. The nucleotide sequence of another CD164 reference cDNA molecule is set forth in SEQ ID NO:102. The nucleotide sequence of another CD164 reference cDNA molecule is set forth in SEQ ID NO:103. The nucleotide sequence of another CD164 reference cDNA molecule is set forth in SEQ ID NO:104.

[0265] The amino acid sequence of a CD164 reference polypeptide is set forth in SEQ ID NO:105 (Isoform 1), and is 163 amino acids in length. The amino acid sequence of another CD164 reference polypeptide is set forth in SEQ ID NO:106 (NP_001135875.1; Isoform 2), and is 189 amino acids in length. The amino acid sequence of another CD164 reference polypeptide is set forth in SEQ ID NO:107 (AAG53906.1; Isoform 3), and is 197 amino acids in length. The amino acid sequence of another CD164 reference polypeptide is set forth in SEQ ID NO:108 (NP_001135873.1; Isoform 4), and is 184 amino acids in length. The amino acid sequence of another CD164 reference polypeptide is set forth in SEQ ID NO:109 (NP_001135874.1; Isoform 5), and is 178 amino acids in length. The amino acid sequence of another CD164 reference polypeptide is set forth in SEQ ID NO:110 (Isoform 6), and is 157 amino acids in length. The amino acid sequence of another CD164 reference polypeptide is set forth in SEQ ID NO:111 (BAG63164.1; Isoform 7), and is 156 amino acids in length. The amino acid sequence of another CD164 reference polypeptide is set forth in SEQ ID NO:112 (AC054891.1; Isoform 8), and is 147 amino acids in length.

[0266] The nucleotide sequence of a PARP1 reference genomic nucleic acid molecule is set forth in SEQ ID NO:113 (ENSG00000143799.14 encompassing chr1:226,360,691-226,408,093 in the GRCh38/hg38 human genome assembly).

[0267] The nucleotide sequence of a PARP1 reference mRNA molecule is set forth in SEQ ID NO:114 (ENST00000366794.10; Isoform 1; 3,978 nt). The nucleotide sequence of another PARP1 reference mRNA molecule is set forth in SEQ ID NO:115 (ENST00000677203.1; Isoform 2; 3,850 nt). The nucleotide sequence of another PARP1 reference mRNA molecule is set forth in SEQ ID NO:116 (J03473.1; Isoform 3; 3,795 nt). The nucleotide sequence of another PARP1 reference mRNA molecule is set forth in SEQ ID NO:117 (BC037545; Isoform 4; 3,677 nt). The nucleotide sequence of another PARP1 reference mRNA molecule is set forth in SEQ ID NO:118 (M18112.1; Isoform 5; 3,640 nt). The nucleotide sequence of another PARP1 reference mRNA molecule is set forth in SEQ ID NO:119 (M32721.1; Isoform 6; 3,660 nt). The nucleotide sequence of another PARP1 reference mRNA molecule is set forth in SEQ ID NO:120 (AK303340.1; Isoform 7; 3,371 nt). The nucleotide sequence of another PARP1 reference mRNA molecule is set forth in SEQ ID NO:121 (M17081.1; Isoform 8; 1,771 nt). The nucleotide sequence of another PARP1 reference mRNA molecule is set forth in SEQ ID NO:122 (AK312339.1; Isoform 9; 3,132 nt). The nucleotide sequence of another PARP1 reference mRNA molecule is set forth in SEQ ID NO:123 (BC018620.1; Isoform 10; 827 nt). The nucleotide sequence of another PARP1 reference mRNA molecule is set forth in SEQ ID NO:124 (BC014206; Isoform 11; 902 nt). The nucleotide sequence of another PARP1 reference mRNA molecule is set forth in SEQ ID NO:125 (ENST00000366792.3; Isoform 12; 553 nt). The nucleotide sequence of another PARP1 reference mRNA molecule is set forth in SEQ ID NO:126 (ENST00000629232.1; Isoform 13; 477 nt). The nucleotide sequence of another PARP1 reference mRNA molecule is set forth in SEQ ID NO:127 (ENST00000366790.3; Isoform 14; 570 nt). The nucleotide sequence of another PARP1 reference mRNA molecule is set forth in SEQ ID NO:128 (ENST00000366794.6; Isoform 15; 3,958 nt).

[0268] The nucleotide sequence of a PARP1 reference cDNA molecule is set forth in SEQ ID NO:129. The nucleotide sequence of another PARP1 reference cDNA molecule is set forth in SEQ ID NO:130. The nucleotide sequence of another PARP1 reference cDNA molecule is set forth in SEQ ID NO:131 The nucleotide sequence of another PARP1 reference cDNA molecule is set forth in SEQ ID NO:132. The nucleotide sequence of another PARP1 reference cDNA molecule is set forth in SEQ ID NO:133. The nucleotide sequence of another PARP1 reference cDNA molecule is set forth in SEQ ID NO:134. The nucleotide sequence of another PARP1 reference cDNA molecule is set forth in SEQ ID NO:135. The nucleotide sequence of another PARP1 reference cDNA molecule is set forth in SEQ ID NO:136. The nucleotide sequence of another PARP1 reference cDNA molecule is set forth in SEQ ID NO:137. The nucleotide sequence of another PARP1 reference cDNA molecule is set forth in SEQ ID NO:138. The nucleotide sequence of another PARP1 reference cDNA molecule is set forth in SEQ ID NO:139. The nucleotide sequence of another PARP1 reference cDNA molecule is set forth in SEQ ID NO:140. The nucleotide sequence of another PARP1 reference cDNA molecule is set forth in SEQ ID NO:141. The nucleotide sequence of another PARP1 reference cDNA molecule is set forth in SEQ ID NO:142. The nucleotide sequence of another PARP1 reference cDNA molecule is set forth in SEQ ID NO:143.

[0269] The amino acid sequence of a PARP1 reference polypeptide is set forth in SEQ ID NO:144 (AAB59447.1; Isoform 1), and is 1,014 amino acids in length. The amino acid sequence of another PARP1 reference polypeptide is set forth in SEQ ID NO:145 (Isoform 2), and is 971 amino acids in length. The amino acid sequence of another PARP1 reference polypeptide is set forth in SEQ ID NO:146 (BAG64403.1; Isoform 3), and is 993 amino acids in length. The amino acid sequence of another PARP1 reference polypeptide is set forth in SEQ ID NO:147 (AAA51599.1; Isoform 4), and is 574 amino acids in length. The amino acid sequence of another PARP1 reference polypeptide is set forth in SEQ ID NO:148 (AAH18620.1; Isoform 5), and is 232 amino acids in length. The amino acid sequence of another PARP1 reference polypeptide is set forth in SEQ ID NO:149 (AAH14206.1; Isoform 6), and is 250 amino acids in length. The amino acid sequence of another PARP1 reference polypeptide is set forth in SEQ ID NO:150 (Isoform 7), and is 108 amino acids in length. The amino acid sequence of another PARP1 reference polypeptide is set forth in SEQ ID NO:151 (Isoform 8), and is 155 amino acids in length.

[0270] The nucleotide sequence of a DNMT3A reference genomic nucleic acid molecule is set forth in SEQ ID NO:212 (ENSG00000119772.17 encompassing chr2:25,227,855-25,342,590 in the GRCh38/hg38 human genome assembly).

[0271] The nucleotide sequence of a DNMT3A reference mRNA molecule is set forth in SEQ ID NO:213 (ENST00000264709.7; Isoform 1; 9,501 nt). The nucleotide sequence of another DNMT3A reference mRNA molecule is set forth in SEQ ID NO:214 (ENST00000321117.10; Isoform 2; 9,421 nt). The nucleotide sequence of another DNMT3A reference mRNA molecule is set forth in SEQ ID NO:215 (ENST00000406659.3; Isoform 3; 1,775 nt). The nucleotide sequence of another DNMT3A reference mRNA molecule is set forth in SEQ ID NO:216 (ENST00000380746.8; Isoform 4; 3,589 nt). The nucleotide sequence of another DNMT3A reference mRNA molecule is set forth in SEQ ID NO:217 (ENST00000402667.1; Isoform 5; 2,300 nt). The nucleotide sequence of another DNMT3A reference mRNA molecule is set forth in SEQ ID NO:218 (NM_175629.2; Isoform 6; 4,395 nt). The nucleotide sequence of another DNMT3A reference mRNA molecule is set forth in SEQ ID NO:219 (NM_001320892.2; Isoform 7; 1,714 nt). The nucleotide sequence of another DNMT3A reference mRNA molecule is set forth in SEQ ID NO:220 (NM_175630.1; Isoform 8; 1,808 nt). The nucleotide sequence of another DNMT3A reference mRNA molecule is set forth in SEQ ID NO:221 (NM_001320893.1; Isoform 9; 3,638 nt). The nucleotide sequence of another DNMT3A reference mRNA molecule is set forth in SEQ ID NO:222 (NM_153759.3; Isoform 10; 3,608 nt). The nucleotide sequence of another DNMT3A reference mRNA molecule is set forth in SEQ ID NO:223 (NM_001375819.1; Isoform 11; 3,473 nt). The nucleotide sequence of another DNMT3A reference mRNA molecule is set forth in SEQ ID NO:224 (BC043617.1; Isoform 12; 4,294 nt). The nucleotide sequence of another DNMT3A reference mRNA molecule is set forth in SEQ ID NO:225 (AF331856.1; Isoform 13; 4,258 nt). The nucleotide sequence of another DNMT3A reference mRNA molecule is set forth in SEQ ID NO:226 (A13208833.1; Isoform 14; 4,476 nt). The nucleotide sequence of another DNMT3A reference mRNA molecule is set forth in SEQ ID NO:227 (BC018214.1; Isoform 15; 1,758 nt). The nucleotide sequence of another DNMT3A reference mRNA molecule is set forth in SEQ ID NO:228 (AF480163.1; Isoform 16; 2,371 nt). The nucleotide sequence of another DNMT3A reference mRNA molecule is set forth in SEQ ID NO:229 (BC023612.2; Isoform 17; 1,113 nt). The nucleotide sequence of another DNMT3A reference mRNA molecule is set forth in SEQ ID NO:230 (AF067972.2; Isoform 18; 3,005 nt). The nucleotide sequence of another DNMT3A reference mRNA molecule is set forth in SEQ ID NO:231 (BC051864.1; Isoform 19; 943 nt). The nucleotide sequence of another DNMT3A reference mRNA molecule is set forth in SEQ ID NO:232 (ENST00000321117.9; Isoform 20; 4,279 nt). The nucleotide sequence of another DNMT3A reference mRNA molecule is set forth in SEQ ID NO:233 (ENST00000380756.4; Isoform 21; 4,477 nt). The nucleotide sequence of another DNMT3A reference mRNA molecule is set forth in SEQ ID NO:234 (ENST00000683760.1; Isoform 22; 3,585 nt).

[0272] The nucleotide sequence of a DNMT3A reference cDNA molecule is set forth in SEQ ID NO:235. The nucleotide sequence of another DNMT3A reference cDNA molecule is set forth in SEQ ID NO:236. The nucleotide sequence of another DNMT3A reference cDNA molecule is set forth in SEQ ID NO:237. The nucleotide sequence of another DNMT3A reference cDNA molecule is set forth in SEQ ID NO:238. The nucleotide sequence of another DNMT3A reference cDNA molecule is set forth in SEQ ID NO:239. The nucleotide sequence of another DNMT3A reference cDNA molecule is set forth in SEQ ID NO:240. The nucleotide sequence of another DNMT3A reference cDNA molecule is set forth in SEQ ID NO:241. The nucleotide sequence of another DNMT3A reference cDNA molecule is set forth in SEQ ID NO:242. The nucleotide sequence of another DNMT3A reference cDNA molecule is set forth in SEQ ID NO:243. The nucleotide sequence of another DNMT3A reference cDNA molecule is set forth in SEQ ID NO:244. The nucleotide sequence of another DNMT3A reference cDNA molecule is set forth in SEQ ID NO:245. The nucleotide sequence of another DNMT3A reference cDNA molecule is set forth in SEQ ID NO:246. The nucleotide sequence of another DNMT3A reference cDNA molecule is set forth in SEQ ID NO:247. The nucleotide sequence of another DNMT3A reference cDNA molecule is set forth in SEQ ID NO:248. The nucleotide sequence of another DNMT3A reference cDNA molecule is set forth in SEQ ID NO:249. The nucleotide sequence of another DNMT3A reference cDNA molecule is set forth in SEQ ID NO:250. The nucleotide sequence of another DNMT3A reference cDNA molecule is set forth in SEQ ID NO:251. The nucleotide sequence of another DNMT3A reference cDNA molecule is set forth in SEQ ID NO:252. The nucleotide sequence of another DNMT3A reference cDNA molecule is set forth in SEQ ID NO:253. The nucleotide sequence of another DNMT3A reference cDNA molecule is set forth in SEQ ID NO:254. The nucleotide sequence of another DNMT3A reference cDNA molecule is set forth in SEQ ID NO:255. The nucleotide sequence of another DNMT3A reference cDNA molecule is set forth in SEQ ID NO:256.

[0273] The amino acid sequence of a DNMT3A reference polypeptide is set forth in SEQ ID NO:257 (NP_783328.1; Isoform 1), and is 912 amino acids in length. The amino acid sequence of another DNMT3A reference polypeptide is set forth in SEQ ID NO:258 (NP_001307821.1; Isoform 2), and is 166 amino acids in length. The amino acid sequence of another DNMT3A reference polypeptide is set forth in SEQ ID NO:259 (NP_715640.2; Isoform 3), and is 723 amino acids in length. The amino acid sequence of another DNMT3A reference polypeptide is set forth in SEQ ID NO:260 (NP_001362748.1; Isoform 4), and is 689 amino acids in length. The amino acid sequence of another DNMT3A reference polypeptide is set forth in SEQ ID NO:261 (NP_001307822.1; Isoform 5), and is 760 amino acids in length. The amino acid sequence of another DNMT3A reference polypeptide is set forth in SEQ ID NO:262 (AAL57039.1; Isoform 6), and is 909 amino acids in length. The amino acid sequence of another DNMT3A reference polypeptide is set forth in SEQ ID NO:263 (BAD92070.1; Isoform 7), and is 811 amino acids in length. The amino acid sequence of another DNMT3A reference polypeptide is set forth in SEQ ID NO:264 (AAH18214.1; Isoform 8), and is 285 amino acids in length. The amino acid sequence of another DNMT3A reference polypeptide is set forth in SEQ ID NO:265 (AAH23612.1; Isoform 9), and is 351 amino acids in length. The amino acid sequence of another DNMT3A reference polypeptide is set forth in SEQ ID NO:266 (AAH23612.1; Isoform 10), and is 781 amino acids in length.

[0274] The nucleotide sequence of an ASXL1 reference genomic nucleic acid molecule is set forth in SEQ ID NO:267 (ENSG00000171456.20 encompassing chr20:32,358,330-32,439,260 in the GRCh38/hg38 human genome assembly).

[0275] The nucleotide sequence of an ASXL1 reference mRNA molecule is set forth in SEQ ID NO:268 (ENST00000651418.1; Isoform 1; 3,146 nt). The nucleotide sequence of another ASXL1 reference mRNA molecule is set forth in SEQ ID NO:269 (ENST00000375687.10; Isoform 2; 7,052 nt). The nucleotide sequence of another ASXL1 reference mRNA molecule is set forth in SEQ ID NO:270 (ENST00000542461.5; Isoform 3; 1,068 nt). The nucleotide sequence of another ASXL1 reference mRNA molecule is set forth in SEQ ID NO:271 (ENST00000613218.4; Isoform 4; 7,038 nt). The nucleotide sequence of another ASXL1 reference mRNA molecule is set forth in SEQ ID NO:272 (ENST00000646367.1; Isoform 5; 1,065 nt). The nucleotide sequence of another ASXL1 reference mRNA molecule is set forth in SEQ ID NO:273 (ENST00000620121.4; Isoform 6; 5,374 nt). The nucleotide sequence of another ASXL1 reference mRNA molecule is set forth in SEQ ID NO:274 (ENST00000646985.1; Isoform 7; 6,666 nt). The nucleotide sequence of another ASXL1 reference mRNA molecule is set forth in SEQ ID NO:275 (ENST00000497249.6; Isoform 8; 495 nt). The nucleotide sequence of another ASXL1 reference mRNA molecule is set forth in SEQ ID NO:276 (ENST00000375689.5; Isoform 9; 812 nt). The nucleotide sequence of another ASXL1 reference mRNA molecule is set forth in SEQ ID NO:277 (ENST00000306058.9; Isoform 10; 6,591 nt). The nucleotide sequence of another ASXL1 reference mRNA molecule is set forth in SEQ ID NO:278 (NM_001164603.1; Isoform 11; 1,084 nt). The nucleotide sequence of another ASXL1 reference mRNA molecule is set forth in SEQ ID NO:279 (BC100280.1; Isoform 12; 1,078 nt). The nucleotide sequence of another ASXL1 reference mRNA molecule is set forth in SEQ ID NO:280 (BC064984.1; Isoform 13; 1,009 nt). The nucleotide sequence of another ASXL1 reference mRNA molecule is set forth in SEQ ID NO:281 (AJ438952.2; Isoform 14; 6,864 nt). The nucleotide sequence of another ASXL1 reference mRNA molecule is set forth in SEQ ID NO:282 (AK122923.1; Isoform 15; 4,685 nt). The nucleotide sequence of another ASXL1 reference mRNA molecule is set forth in SEQ ID NO:283 (AB023195.2; Isoform 16; 6,088 nt). The nucleotide sequence of another ASXL1 reference mRNA molecule is set forth in SEQ ID NO:284 (AL117518.1; Isoform 17; 4,055 nt). The nucleotide sequence of another ASXL1 reference mRNA molecule is set forth in SEQ ID NO:285 (ENST00000375687.5; Isoform 18; 7,031 nt). The nucleotide sequence of another ASXL1 reference mRNA molecule is set forth in SEQ ID NO:286 (ENST00000497249.2; Isoform 19; 296 nt). The nucleotide sequence of another ASXL1 reference mRNA molecule is set forth in SEQ ID NO:287 (ENST00000555343.2; Isoform 20; 1,034 nt).

[0276] The nucleotide sequence of an ASXL1 reference cDNA molecule is set forth in SEQ ID NO:288. The nucleotide sequence of another ASXL1 reference cDNA molecule is set forth in SEQ ID NO:289. The nucleotide sequence of another ASXL1 reference cDNA molecule is set forth in SEQ ID NO:290. The nucleotide sequence of another ASXL1 reference cDNA molecule is set forth in SEQ ID NO:291. The nucleotide sequence of another ASXL1 reference cDNA molecule is set forth in SEQ ID NO:292. The nucleotide sequence of another ASXL1 reference cDNA molecule is set forth in SEQ ID NO:293. The nucleotide sequence of another ASXL1 reference cDNA molecule is set forth in SEQ ID NO:294. The nucleotide sequence of another ASXL1 reference cDNA molecule is set forth in SEQ ID NO:295. The nucleotide sequence of another ASXL1 reference cDNA molecule is set forth in SEQ ID NO:296. The nucleotide sequence of another ASXL1 reference cDNA molecule is set forth in SEQ ID NO:297. The nucleotide sequence of another ASXL1 reference cDNA molecule is set forth in SEQ ID NO:298. The nucleotide sequence of another ASXL1 reference cDNA molecule is set forth in SEQ ID NO:299. The nucleotide sequence of another ASXL1 reference cDNA molecule is set forth in SEQ ID NO:300. The nucleotide sequence of another ASXL1 reference cDNA molecule is set forth in SEQ ID NO:301. The nucleotide sequence of another ASXL1 reference cDNA molecule is set forth in SEQ ID NO:302. The nucleotide sequence of another ASXL1 reference cDNA molecule is set forth in SEQ ID NO:303. The nucleotide sequence of another ASXL1 reference cDNA molecule is set forth in SEQ ID NO:304. The nucleotide sequence of another ASXL1 reference cDNA molecule is set forth in SEQ ID NO:305. The nucleotide sequence of another ASXL1 reference cDNA molecule is set forth in SEQ ID NO:306. The nucleotide sequence of another ASXL1 reference cDNA molecule is set forth in SEQ ID NO:307.

[0277] The amino acid sequence of an ASXL1 reference polypeptide is set forth in SEQ ID NO:308 (Isoform 1), and is 625 amino acids in length. The amino acid sequence of another ASXL1 reference polypeptide is set forth in SEQ ID NO:309 (CAD27708.1; Isoform 2), and is 1,541 amino acids in length. The amino acid sequence of another ASXL1 reference polypeptide is set forth in SEQ ID NO:310 (NP_001158075.1; Isoform 3), and is 85 amino acids in length. The amino acid sequence of another ASXL1 reference polypeptide is set forth in SEQ ID NO:311 (Isoform 4), and is 1,480 amino acids in length. The amino acid sequence of another ASXL1 reference polypeptide is set forth in SEQ ID NO:312 (Isoform 5), and is 75 amino acids in length. The amino acid sequence of another ASXL1 reference polypeptide is set forth in SEQ ID NO:313 (Isoform 6), and is 81 amino acids in length. The amino acid sequence of another ASXL1 reference polypeptide is set forth in SEQ ID NO:314 (Isoform 7), and is 1,536 amino acids in length. The amino acid sequence of another ASXL1 reference polypeptide is set forth in SEQ ID NO:315 (AAH64984.1; Isoform 8), and is 84 amino acids in length. The amino acid sequence of another ASXL1 reference polypeptide is set forth in SEQ ID NO:316 (BAG53800.1; Isoform 9), and is 1,462 amino acids in length. The amino acid sequence of another ASXL1 reference polypeptide is set forth in SEQ ID NO:317 (BAA76822.2; Isoform 10), and is 1,368 amino acids in length. The amino acid sequence of another ASXL1 reference polypeptide is set forth in SEQ ID NO:318 (Isoform 11), and is 1,341 amino acids in length. The amino acid sequence of another ASXL1 reference polypeptide is set forth in SEQ ID NO:319 (Isoform 12), and is 60 amino acids in length. The amino acid sequence of another ASXL1 reference polypeptide is set forth in SEQ ID NO:320 (Isoform 13), and is 57 amino acids in length.

[0278] The genomic nucleic acid molecules, mRNA molecules, and cDNA molecules can be from any organism. For example, the genomic nucleic acid molecules, mRNA molecules, and cDNA molecules can be human or an ortholog from another organism, such as a non-human mammal, a rodent, a mouse, or a rat. It is understood that gene sequences within a population can vary due to polymorphisms such as single-nucleotide polymorphisms. The examples provided herein are only exemplary sequences. Other sequences are also possible.

[0279] Also provided herein are functional polynucleotides that can interact with the disclosed nucleic acid molecules. Examples of functional polynucleotides include, but are not limited to, antisense molecules, aptamers, ribozymes, triplex forming molecules, and external guide sequences. The functional polynucleotides can act as effectors, inhibitors, modulators, and stimulators of a specific activity possessed by a target molecule, or the functional polynucleotides can possess a de novo activity independent of any other molecules.

[0280] The isolated nucleic acid molecules disclosed herein can comprise RNA, DNA, or both RNA and DNA. The isolated nucleic acid molecules can also be linked or fused to a heterologous nucleic acid sequence, such as in a vector, or a heterologous label. For example, the isolated nucleic acid molecules disclosed herein can be within a vector or as an exogenous donor sequence comprising the isolated nucleic acid molecule and a heterologous nucleic acid sequence. The isolated nucleic acid molecules can also be linked or fused to a heterologous label. The label can be directly detectable (such as, for example, fluorophore) or indirectly detectable (such as, for example, hapten, enzyme, or fluorophore quencher). Such labels can be detectable by spectroscopic, photochemical, biochemical, immunochemical, or chemical means. Such labels include, for example, radiolabels, pigments, dyes, chromogens, spin labels, and fluorescent labels. The label can also be, for example, a chemiluminescent substance; a metal-containing substance; or an enzyme, where there occurs an enzyme-dependent secondary generation of signal. The term “label” can also refer to a “tag” or hapten that can bind selectively to a conjugated molecule such that the conjugated molecule, when added subsequently along with a substrate, is used to generate a detectable signal. For example, biotin can be used as a tag along with an avidin or streptavidin conjugate of horseradish peroxidate (HRP) to bind to the tag, and examined using a calorimetric substrate (such as, for example, tetramethylbenzidine (TMB)) or a fluorogenic substrate to detect the presence of HRP. Exemplary labels that can be used as tags to facilitate purification include, but are not limited to, myc, HA, FLAG or 3×FLAG, 6×his or polyhistidine, glutathione-S-transferase (GST), maltose binding protein, an epitope tag, or the Fc portion of immunoglobulin. Numerous labels include, for example, particles, fluorophores, haptens, enzymes and their calorimetric, fluorogenic and chemiluminescent substrates and other labels.

[0281] Percent identity (or percent complementarity) between particular stretches of nucleotide sequences within nucleic acid molecules or amino acid sequences within polypeptides can be determined routinely using BLAST programs (basic local alignment search tools) and PowerBLAST programs (Altschul et al., J. Mol. Biol., 1990, 215, 403-410; Zhang and Madden, Genome Res., 1997, 7, 649-656) or by using the Gap program (Wisconsin Sequence Analysis Package, Version 8 for Unix, Genetics Computer Group, University Research Park, Madison Wis.), using default settings, which uses the algorithm of Smith and Waterman (Adv. Appl. Math., 1981, 2, 482-489). Herein, if reference is made to percent sequence identity, the higher percentages of sequence identity are preferred over the lower ones.

[0282] As used herein, the phrase “corresponding to” or grammatical variations thereof when used in the context of the numbering of a particular nucleotide or nucleotide sequence or position refers to the numbering of a specified reference sequence when the particular nucleotide or nucleotide sequence is compared to a reference sequence (such as, for example, SEQ ID NO:1, SEQ ID NO:55, or SEQ ID NO:113). In other words, the residue (such as, for example, nucleotide or amino acid) number or residue (such as, for example, nucleotide or amino acid) position of a particular polymer is designated with respect to the reference sequence rather than by the actual numerical position of the residue within the particular nucleotide or nucleotide sequence. For example, a particular nucleotide sequence can be aligned to a reference sequence by introducing gaps to optimize residue matches between the two sequences. In these cases, although the gaps are present, the numbering of the residue in the particular nucleotide or nucleotide sequence is made with respect to the reference sequence to which it has been aligned.

[0283] The nucleotide and amino acid sequences listed in the accompanying sequence listing are shown using standard letter abbreviations for nucleotide bases, and three-letter code for amino acids. The nucleotide sequences follow the standard convention of beginning at the 5′ end of the sequence and proceeding forward (i.e., from left to right in each line) to the 3′ end. Only one strand of each nucleotide sequence is shown, but the complementary strand is understood to be included by any reference to the displayed strand. The amino acid sequence follows the standard convention of beginning at the amino terminus of the sequence and proceeding forward (i.e., from left to right in each line) to the carboxy terminus.

[0284] The present disclosure also provides methods of stratifying a suitable lung cancer patient for treatment with a PARP1 inhibitor. The methods comprise determining whether the patient carries a DNMT3A R882H somatic mutation or TET2 somatic mutation deficiency. The patient with the DNMT3A R882H somatic mutation or TET2 somatic mutation deficiency can be excluded from a PARP1 inhibitor treatment regimen.

[0285] The present disclosure also provides therapeutic agents that prevent or reduce CHIP for use in the prevention and/or reduction of CHIP in a subject having: an LY75 variant genomic nucleic acid molecule, a CD164 variant genomic nucleic acid molecule, and/or a PARP1 variant genomic nucleic acid molecule; an LY75 variant mRNA molecule, a CD164 variant mRNA molecule, and/or a PARP1 variant mRNA molecule; or an LY75 variant cDNA molecule, a CD164 variant cDNA molecule, and/or a PARP1 variant cDNA molecule. Any of the therapeutic agents that prevent or reduce CHIP described herein can be used in these methods.

[0286] The present disclosure also provides uses of therapeutic agents that prevent or reduce CHIP for use in the preparation of a medicament for prevention or reduction of CHIP in a subject having: an LY75 variant genomic nucleic acid molecule, a CD164 variant genomic nucleic acid molecule, and/or a PARP1 variant genomic nucleic acid molecule; an LY75 variant mRNA molecule, a CD164 variant mRNA molecule, and/or a PARP1 variant mRNA molecule; or an LY75 variant cDNA molecule, a CD164 variant cDNA molecule, and/or a PARP1 variant cDNA molecule. Any of the therapeutic agents that prevent or reduce CHIP described herein can be used in these methods.

[0287] The present disclosure also provides an LY75 inhibitor for use in the prevention or reduction of CHIP in a subject having: an LY75 variant genomic nucleic acid, an LY75 variant mRNA molecule, or an LY75 variant cDNA molecule. Any of the LY75 inhibitors described herein can be used in these methods.

[0288] The present disclosure also provides a CD164 inhibitor for use in the prevention or reduction of CHIP CHIP in a subject having: a CD164 variant genomic nucleic acid molecule, a CD164 variant mRNA molecule, or a CD164 variant cDNA molecule. Any of the CD164 inhibitors described herein can be used in these methods.

[0289] The present disclosure also provides a PARP1 inhibitor for use in the prevention or reduction of CHIP in a subject having: a PARP1 variant genomic nucleic acid molecule, a PARP1 variant mRNA molecule, or a PARP1 variant cDNA molecule. Any of the PARP1 inhibitors described herein can be used in these methods.

[0290] The present disclosure also provides an LY75 inhibitor for use in the preparation of a medicament for the prevention or reduction of CHIP in a subject having: an LY75 variant genomic nucleic acid molecule, an LY75 variant mRNA molecule, or an LY75 variant cDNA molecule. Any of the LY75 inhibitors described herein can be used in these methods.

[0291] The present disclosure also provides a CD164 inhibitor for use in the preparation of a medicament for the prevention or reduction of CHIP in a subject having: a CD164 variant genomic nucleic acid molecule, a CD164 variant mRNA molecule, or a CD164 variant cDNA molecule. Any of the CD164 inhibitors described herein can be used in these methods.

[0292] The present disclosure also provides a PARP1 inhibitor for use in preparation of a medicament for the prevention or reduction of CHIP in a subject having: a PARP1 variant genomic nucleic acid molecule, a PARP1 variant mRNA molecule, or a PARP1 variant cDNA molecule. Any of the PARP1 inhibitors described herein can be used in these methods.

[0293] All patent documents, websites, other publications, accession numbers and the like cited above or below are incorporated by reference in their entirety for all purposes to the same extent as if each individual item were specifically and individually indicated to be so incorporated by reference. If different versions of a sequence are associated with an accession number at different times, the version associated with the accession number at the effective filing date of this application is meant. The effective filing date means the earlier of the actual filing date or filing date of a priority application referring to the accession number if applicable. Likewise, if different versions of a publication, website or the like are published at different times, the version most recently published at the effective filing date of the application is meant unless otherwise indicated. Any feature, step, element, embodiment, or aspect of the present disclosure can be used in combination with any other feature, step, element, embodiment, or aspect unless specifically indicated otherwise. Although the present disclosure has been described in some detail by way of illustration and example for purposes of clarity and understanding, it will be apparent that certain changes and modifications may be practiced within the scope of the appended claims.

[0294] The following examples are provided to describe the embodiments in greater detail. They are intended to illustrate, not to limit, the claimed embodiments. The following examples provide those of ordinary skill in the art with a disclosure and description of how the compounds, compositions, articles, devices and/or methods described herein are made and evaluated, and are intended to be purely exemplary and are not intended to limit the scope of any claims. Efforts have been made to ensure accuracy with respect to numbers (such as, for example, amounts, temperature, etc.), but some errors and deviations may be accounted for. Unless indicated otherwise, parts are parts by weight, temperature is in ° C. or is at ambient temperature, and pressure is at or near atmospheric.

### EXAMPLES

### Example 1: Common Variants in LY75/CD302/LY75-CD302 Locus Associate with CHIP

[0295] Several common variants in LY75/CD302/LY75-CD302 locus associate with CHIP, including LY75 missense rs78446341 (see, Table 4).

TABLE 4
LY75/CD302/LY75-CD302 locus associations with CHIP

| Variant | rsID | P-value | Effect | MAF | CADD | varEffect | Lof |
|---|---|---|---|---|---|---|---|
| 2:159868900:C:A | rs56186131 | 2.83E−12 | 1.058 | 0.4569 | 0.371 | intronic | No |
| 2:159861821:C:G | rs72955755 | 3.13E−12 | 1.058 | 0.4562 | 0.676 | intronic | No |
| 2:159870033:T:G | rs17231342 | 3.94E−12 | 1.058 | 0.4560 | 4.066 | intronic | No |
| 2:159834145:G:A | rs78446341 | 2.48E−08 | 0.8541 | 0.0227 | 24.5 | missense | No |

| | | | | | | | nGWASctlg | |
|---|---|---|---|---|---|---|---|---|
| Variant | rsID | eQTL | min_eQTLPval | ls Path | lnHGMD | lnGWASctlg | Traits | minGWASctlgPval |
| 2:159868900:C:A | rs56186131 | FALSE | NA | FALSE | FALSE | FALSE | 0 | NA |
| 2:159861821:C:G | rs72955755 | TRUE | 2.51E−14 | FALSE | FALSE | FALSE | 0 | NA |
| 2:159870033:T:G | rs17231342 | TRUE | 9.17E−14 | FALSE | FALSE | FALSE | 0 | NA |
| 2:159834145:G:A | rs78446341 | FALSE | NA | FALSE | TRUE | TRUE | 1 | 4.00E−29 |

[0296] Common LY75-CD302 locus variants that are in eQTLs for nearby genes are shown in Table 5.

TABLE 5
Common LY75-CD302 locus variants are in eQTLs for nearby genes

| uid | geneName | Pval | Dataset |
|---|---|---|---|
| 2:159861821:C:G | AC009961.1 | 2.51e−14 | RegnGHS_Liver |
| 2:159870033:T:G | MARCH7 | 3.403e−13 | Westra_Whole_ Blood |
| 2:159870033:T:G | MARCH7 | 9.1657e−14 | Vosa_Whole_ Blood |

Common LY75-CD302 locus variants are in eQTLs for nearby genes

| | | Effect_ | | |
|---|---|---|---|---|
| uid | Cis_Trans | Allele | Ref_Allele | Effects |
| 2:159861821:C:G | CIS | G | C | 0.214 |
| 2:159870033:T:G | CIS | G | T | −7.2774 |
| 2:159870033:T:G | CIS | G | T | −7.4524 |

[0297] Finemapping the LY75-CD302 locus identified rs78446341 as highly likely (^{˜}80%) to be driving the association signal at this locus (data not shown). In addition, all LY75 burden masks suggest a reduced CHIP risk (see, FIG. 1). Moreover, the effect of the ly75 locus varies by CHIP gene mutation carrier (see, FIG. 2).

[0298] LY75 missense p.Pro1247Leu significantly associated with platelets, neutrophils, and lymphocytes in UKB 500K (see, Table 6; Variant=2:159834145:G:A; HGVS=p.Pro1247Leu).

TABLE 6
LY75 missense p.Pro1247Leu significantly associates with platelets,
neutrophils, and lymphocytes in UKB 500K

| | Effect | | Cases | Controls | |
|---|---|---|---|---|---|
| Phenotype | (95% Cl) | P-value | RR\|RA\|AA | RR\|RA\|AA | AAF |
| Platelet crit | ↑ 0.115 | 8.3E−76 | NA | 399599\|19216\| | 0.024 |
| | (0.103, 0.128) | | | 245 | |
| Neutrophils | ↑ 0.047 | 2.7E−12 | NA | 398255\|19282\| | 0.024 |
| | (0.034, 0.061) | | | 242 | |
| Lymphocytes | ↓ −0.046 | 4.5E−12 | NA | 398260\|19282\| | 0.024 |
| | (−0.060, −0.033) | | | 242 | |

[0299] Additional rare pLoFs and rare missense variants in LY75 also associated with reduced odds of CHIP (see, Table 7, Phenotype=CHIP; and FIG. 3).

TABLE 7
Additional rare pLoFs and rare missense variants
in LY75 also associate with reduced odds of CHIP

| | Variants in | | | Cases | Controls | |
|---|---|---|---|---|---|---|
| Mask | Mask | Effect (95% CI) | P-value | RR \| RA \| AA | RR \| RA \| AA | AAF |
| M1.1 | pLoFs, <1% | 0.78 | 2.6E−4 | 34385 \| 215 \| 0 | 499850 \| 4037 \| 2 | 0.004 |
| | AAF | (0.68, 0.89) | | | | |
| M1.01 | pLoFs, <0.1% | 0.75 | 6.5E−3 | 34504 \| 96 \| 0 | 502106 \| 1783 \| 0 | 0.002 |
| | AAF | (0.61, 0.92) | | | | |
| M3.1 | pLoFs & | 0.78 | 4.3E−4 | 34283 \| 218 \| 0 | 499841 \| 4046 \| 2 | 0.004 |
| | missense, <1% | (0.68, 0.90) | | | | |
| | AAF | | | | | |
| M3.01 | pLoFs & | 0.77 | 0.012 | 34501 \| 99 \| 0 | 502096 \| 1792 \| 0 | 0.002 |
| | missense, <0.1% | (0.63, 0.94) | | | | |
| | AAF | | | | | |

### Example 2: Common Variants in CD164 Locus Associate with CHIP

[0300] Multiple common variant signals in CD164 locus associate with CHIP, although fine-mapping does not point to a causal gene (data not shown). In addition, eQTL data supports variant effects on CD164 expression (see, Table 8).

TABLE 8
eQTL data variant effects on CD164 expression

| Uid | geneName | Pval | Dataset |
|---|---|---|---|
| 6:109287294:C:T | CD164 | 5.56e−14 | Fairfax_Monocytes_LPS24 |
| 6:109326927:T:G | CD164 | 5.58008e−19 | GTeXv*_Whole_Blood |
| 6:109381443:A:T | CD164 | 4.037e−29 | Chen_Neutrophils |

eQTL data variant effects on CD164 expression

| uid | Cis_Trans | Effect_Allele | Ref_Allele | Effects |
|---|---|---|---|---|
| 6:109287294:C:T | CIS | NA | NA | NA |
| 6:109326927:T:G | CIS | G | T | 0.123912 |
| 6:109381443:A:T | CIS | T | A | −1.117 |

### Example 3: Common Variants in PARP1 Locus Associate with CHIP

[0301] A PARP1 1:226367601:A:C missense variant was in perfect LD with index SNP and showed a protective association (see, FIG. 4). Other CHIP-associated variants were significant eQTLs for PARP1 (see, FIG. 5).

### Example 4: Somatic Mutations in DNMT3A and/or ASXL1 Associate with Increased Risk of Developing Lung Cancer

[0302] Exome sequencing data from the UKB Exome Sequencing Consortium was used to identify CHIP somatic mutation carriers across 454,787 UKB participants. This was complemented by generating an additional CHIP callset across 133,370 individuals from the DiscoverEHR Cohort. These represent the largest CHIP callsets to date, and were used to conduct genetic association analyses of CHIP across 29,669 CHIP mutation carriers from UKB, and to perform replication in 14,766 CHIP mutation carriers from the DiscoverEHR cohort. 27 loci associated with CHIP were identified in UKB at genome-wide significance, which was replicated in DiscoverEHR. Additionally, phenotypic associations for both CHIP somatic mutation carriers and germline CHIP risk loci were investigated across 35,000 traits from the UK Biobank.

[0303] The analysis described herein only includes CHIP carriers with the largest expansion of blood cells with the CHIP mutations (estimated to have ^{˜}20% of their blood cells with the CHIP mutations. It was determined whether CHIP carriers were at an elevated risk of developing solid tumors (see FIG. 6), and it was found that high variant allele fraction (VAF) carriers are at significantly elevated risk of developing lung cancer (HR=1.62 (1.41-1.87), p=1.36*10-11), and modestly increased risk of developing prostate (HR=1.17 (1.04-1.31), p=7.1*10−3) and breast cancers (HR=1.15 (1.002-1.322), p=0.047). No increased risk for the development of colon cancer was found (HR=0.96 (0.79-1.16), p=0.66). Models estimating event risk on the basis of CHIP mutational subtype (e.g., carriers must have DNMT3A mutations) suggest that these associations with prostate and breast cancer are driven primarily by DNMT3A mutations.

[0304] Given the strong associations between CHIP and blood cancer and lung cancer, and the associations between smoking and both CHIP and lung cancer, additional analyses stratified by smoking status were performed to test whether these associations were driven by smoking and merely marked by CHIP mutations. High VAF CHIP carriers are at an elevated risk of developing blood cancers in smokers (2.37 (1.86-3.03), p=5.24*10-12) and non-smokers (2.05 (1.68-2.49), P=7.47*10-13), and this pattern was similar among all CHIP carriers and across associations with CHIP mutation subtype ASXL1-CHIP. Lung cancer risk among all CHIP carriers is the same among smokers (HR=1.45 (1.28-1.63), p=1.10*10-9) and non-smokers (HR=1.45 (1.18-1.80), P=5.46*10-4), and is actually higher in non-smokers among CHIP carriers with VAF 10% (HRsmokers=1.56 (1.33-1.84), p=7.32*10-8 compared to HRnon-smokers=1.93 (1.47-2.54), P=2.86*10-6). When sub-setting to DNMT3A-CHIP and ASXL1-CHIP, the patterns were similar. Overall, the models suggest that CHIP mutation carriers are at an elevated risk of blood cancer and lung cancer independent of smoking, but that CHIP is likely also marking additional blood cancer risk that results from smoking.

[0305] In summary, in longitudinal analyses, it was found that individuals who carry CHIP somatic mutations in either DNMT3A or ASXL1 have an increased risk of lung cancer in both smokers and non-smokers, which indicates that CHIP is an independent risk factor for malignant neoplasms outside of the hemopoietic lineage.

### Example 5: Effects of PARPi on Cells Harboring CHIP Gene Mutation

[0306] To determine the effect, if any, that PARP1 inhibitors have on cells in vitro that carry CHIP gene mutations, variants/mutations were engineered into cell lines using CRISPR-Cas9 and specifically optimized sgRNA target sequence as well donor sequence for the DNMT3A Knockin. Functional modeling of identified CHIP-GWAS locus was performed. Selected PARP1 locus from CHIP-GWAS analysis showed significant association of DNMT3A to protective PARP1 germline variant (data not shown). FIG. 7, Panels A and B show systematic tracking of HDR and INDEL percentages in PARPi treated cells. Cells were treated with PARPi for 8 days and then subjected to Sanger sequencing across each locus to determine population dynamics. FIG. 7, Panel A shows RPE-1 hTERT cells harboring CRISPR mediated knock-in of DNMT3A-R882H allele. This shows that there is no effect of PARP1 inhibitor treatment on cells carrying the DNMT3A variant allele and it remains unchanged in the population as compared to DMSO (control/vehicle) alone. Thus, PARP1 inhibitors had no effect on cells carrying the DNMT3A-R882H variant. Referring to FIG. 7, Panel A, the percentage represents the percent of sequences that derive from that represented allele in the legend, with all three legend items adding up to roughly 100% for each of the samples. Thus, the wild-type allele (blue group) for the DMSO group has an average of ^{˜}16% (16% of the sequences in the population of cells are wild-type). The R882H allele (black group) in DMSO has ^{˜}24% (24% of the sequences derived from the population of cells have the R882H mutation). The INDEL (red group) in DMSO has ^{˜}60% (60% of sequences in the population carry INDEL (nucleotide insertion/deletion) alleles). The total for wild-type, R882H, and INDEL for the DMSO group is ^{˜}100% of the sequences analyzed.

[0307] FIG. 7, Panel B shows CRISPR-mediated TET2-deficieny in HEK293T cells. Cells carrying potential loss of function alleles (INDELs/KO alleles) are resistant to PARP1 inhibitor treatment—in olaparib and talazoparib conditions, the percentage of INDELs (mutant alleles) increased compared to DMSO (control/vehicle). This means that cells carrying TET2 KO/INDEL alleles survive better than wild-type alleles in response to treatment with PARP1 inhibitors. Thus, in this case, it may be advisable to avoid PARP1 inhibitor treatment in order to not increase clonal selection for those TET2 mutant/variant alleles that cause deficiency.

### Example 6: Jointly Fine-Mapping Common and Rare Variants at the LY75 Locus

[0308] DNMT3A, which was the most commonly mutated gene in the overall CHIP phenotype, had the largest number of significantly associated loci (n=23), most of which overlapped with the overall CHIP association signals. At a locus on chromosome 2, rs78446341 (P1247L in LY75) was associated with reduced risk of DNMT3A-CHIP (OR=0.78 (0.72-0.84), P=3.70×10⁻⁹, and was prioritized by fine-mapping. LY75 features lymphocyte specific expression, and is thought to be involved in antigen presentation and lymphocyte proliferation. A second rare (AAF=0.002) missense variant (r5147820690-T, G525E) was also identified that associated with reduced risk of DNMT3A-CHIP at close to genome-wide significance (OR=0.48 (0.36-0.63), P=1.15×10⁻⁷). This variant was predicted as likely to be damaging (CADD=23.6) and remains associated (OR=0.63 (0.51-0.77), P=4.80×10⁻⁶) when conditioning on common variant signal in this locus (i.e., this rare variant signal is independent of the common variant signal in this locus). This variant was also prioritized by fine-mapping. Finally, these signals in PARP1 and LY75 replicated in GHS (see, FIG. 8).

[0309] The more common LY75 missense variant (r578446341-A, P1247L) is located in the extracellular domain of lymphocytic antigen 75, which is also known as DEC-205/CD205, and plays a role in antigenic capture, processing, and presentation. The rarer LY75 missense variant (r5147820690-T, G525E) is located in a C-type lectin domain and reported to interact directly with this receptor's ligand. The protective associations with this variant that weRE identified HEREIN appear to be most pronounced for DNMT3A-CHIP and mLOY and highlight LY75 as a therapeutic target for the antagonization of CH in general.

[0310] To further evaluate whether the rare variant association at the LY75 locus (r5147820690-T) was independent of other common and rare variant signals, joint fine-mapping (with FINEMAP) was performed on common and rare variants at this locus while including rarer variants then used in our genome-wide fine-mapping. In contrast to the genome-wide fine-mapping described above, this fine-mapping sensitivity analysis was done only in the UKB, was focused on the LY75 locus, and included all variants in the dataset. That is, the fine-mapping analysis was run as described above, but with a MAF >0.0000000001. While FINEMAP suggests 3 credible sets are most parsimonious at this locus (posterior probability=0.8), which is consistent with the results we report when preforming genome-wide fine-mapping, the fourth credible set (posterior probability=0.11) identifies rs147820690-T as the top signal (PIP=0.133) among 9,417 variants in the 95% credible set. This fine-mapping approach also prioritizes rs78446341-A (CPIP=0.92, CS=2). Furthermore, the median pairwise LD between SNPs in this fourth credible set is very low (6.7×10⁻⁴, compared with 0.995, 0.962, and 0.831 for the first three credible sets, respectively). Therefore, these fine-mapping results provide additional support for both LY75 missense variants, as well as the fact that the rs147820690-T rare variant signal is not driven by the tagging of other rare variants.

[0311] Various modifications of the described subject matter, in addition to those described herein, will be apparent to those skilled in the art from the foregoing description. Such modifications are also intended to fall within the scope of the appended claims. Each reference (including, but not limited to, journal articles, U.S. and non-U.S. patents, patent application publications, international patent application publications, gene bank accession numbers, and the like) cited in the present application is incorporated herein by reference in its entirety and for all purposes.

The application's sequence listing, which the Patent Office published only in electronic form, follows.

SEQUENCE LISTING (320 sequences)

SEQ ID NO: 1 - DNA, 101402 bp, Homo sapiens
  source 1..101402: mol_type = genomic DNA
aggccgcgctcagcaggcggggcgggagccgcgtgcgcccgaggacccggccggaaggcttgcgccagctcaggatgaggacaggctgggcgacccctcgccgcccggcggggctcctcatgctgctcttctggttcttcgatctcgcggagccctctggccgcgcaggtaaccgcgggcacgccagccccgcagtccgctgggtgcctcgacgccacagctctgctgccttccagcctggggcagggctgcgcccctggggcaggtcacggctgctttgctgttggggcgggggggctctggagccggaagagtgagtcgcaggggaggtctggcagaggaagcgccccagtgccctcgggggcccggaggagggcgcggtggatgtgggaggacagggcccttctggtgcagaggggacgcggtgcaccgtagagtaggcgcacggaggcttttttggccgggtgcgctgctccatcgtcgcctctcttatataatgttgctggagtatggggttccccatctgccctcttgcgtcccgtccctcccgttctcgcttttccttcggcccttggtcaccttggccacagggccaagaggagcctccacccacagcgccaaggattccccacgattcccggatttcactgcgcctacggtgcgcatcaggaaggaagtcaggttaaataaaccatctcctccgaaagtgaccaagaccaagagtcagctatgatgccctcacccaccgcctagagcaacaaacctttcttctcattggtttatcagctccaaatgaccccgctcccccaaggctgacagcctcacggtgaagggcaggtcgcctgcttggggacctgctgcctctcactgcggaagcaggaccagaaacagacagccttcattgatgttcagggtagtgccagccccaccacaccacaccccttggcagcaaccggttgcttttactttctctttttgcctgggcgaggggtgtgcagagaactttgtttcttggttggactgcatcatgggcactcaatgggccaccctccaccggccacttctgttatcgtgcctgtatgaggaaggaaaagattgtccaggcagtttgaaaaacattaaattgttggtggctcttattttctttgcagctaagctaagttaccatctggtttagacttccttcggagagcgatgggaagagatttctcagagtgtgaatggcatcatcctatctacagcaaggacctggaaatgaaccctgctctgagtcacacttctctattctcctttgaccctgtgtgctaggaactaccaaaagaatcctttaaaataagatcctttattgccttgataatttattctgcctgccccacaatccaaggtggaaaagttcactgcagcaactaactacagtgaaaatgcactaacttttcaatcactaacctcttggttcccatcgacatctgcttcagtcctgtttttatctccttcacaaatttcaggatttccctaattcttgcaatctctgcaatcactgccctttatcactgacccaaagcaaaaagcaccaggtttaactctgttccccctgtgctaggtccccacaggttttgttatcctgtatccttccttactcctagcagctactctgatcgattttctctcaccctcagagcagacttgtggccttgtttggggaagcactggaattttgaacccccagccatttgggtcaattgtttggcaagagtgtccgcttcatgatgctggtgatggcatgcacctcgtcacatgtgcacggctaggcttgtgcaggtggcctctattacccaaacactgaaggagcccctctgtgtccttggagagatgccaggtgcttagtttacatttttgcctgcttggagagctaacagcttgaagtaaaccaatccatcagggactcctgaggttttcaccagccaacaccacccaatcgtgcgtgaagactttctgactccctggacattgccatggactcaactgtcacttcaggacctgtttttgaactaacaaacctagacttctgattctctcttgctgcacctacctgtacattccgaacacatggtagagactctacaaaatgcttaatatgtgatctatggacggttcccctgaaattataaatgctgccatcttcatccttcttgttttcccaagctatttccctatccatttgtctgtggttataaatgtcaatatccagcttctctttggaatgtgtgaagctctttggtctagggaccaaaggcaggaattatttagtgatcagacaataagaaaacactgaaagagatgatttgcctttgatggatgtaaaaatactaaaaatttattttcaatttatggtaatgctacttagccattttctctcaaacaccactggagaatttatataacatgaagcatatacaaaatgcatctagggggtaatgaggcttctcttcatcaacttctgccttttagatttgccccaatattgtacttggaggtaaatattaaaactccattgaggactggtataaagttgtaaagtgaacaaaacccagtagaaagctattgataaagaatctattttataaaataagttttatacaataaaatctactctgtaattaccttttcaaagtatatttctaaaatagcttatatgcccttctgtaccaaattttctaaataagggattatgttcacactttctcagtcctccttccagctcttcaacctactatcccaataagggtcgtaagactgaggcagtttcaacagctcctgctaaggttaaagaaagatacggggaagcatcatgaaaggataggactctccctatctaatgtatgtttatacataccttatatatggaggctaataagtttcctttaagtatatcaataattaagatctgtactaagtgaccactataagtgtcacattgaaattgcatacttggttcaaacaagggattagtctgagaaaaacatctatattcagagatgtagcagtttgttaggaagtttggcagctccactttaacatagctactccacacctctcctgtagtgttttagtgtttcaatctcggactcctaactcctgctttttccactgtataaagaaatgtagctaatccattggattctacaaaaattttgaaaaatccagaactgcaaactgcaaaggaaggcaaagctgctgcttccccagttcacctgtttgggatccagcacacaaagcagaatgcccgggaaagacagcagcaagactacagggcaggagaggggctgtttccaacaagggtgatgggcacgtctcctgcaggagcagacttcttttttcttctgtaatttttgatactttggaatgcaagatttattttggagaggcaagagagaatactttggaaaagatgtagatcagagatctgagtagctattgaattgtgggagaaggccatgagagaaagtgtgagtagtaatcttatagcacattttccttttttgttgactgtcttcccagcctgtgtccatcaagtagaaaatggcagaggaatgtcaaagaagaaagtgtgagggatgtggctgggcacggtatctcatgcctataatcccagcattttgggaggccgaagtgggtggatcacctgaggtcaggagttcgagaccagcttggccaacatggtgaaaccccatctctactaaaaatacaaaaattacccgggtgtggtggcaggcacctgtaatctcagctacttgggaggctggggcatgagaatcacttgaacctgggaggcggaggttgcagttagctgagattgtgccactgcactccagcctgggcaacagagcaagactccatctcaaaaaaaaaagtgtgaaggatgaaagctgctatggcaaacatccttagctgcaatcctgtggaatacttttaaaattcagatttaaaataactttaagctttaaaggattgttgttgctgttgttgtttctcttgtcgttgcttctgttatttaaaacaaaacaaaaaaatccttccaaagttcaagctgcagtgagacttaattttatagttattatttacatggtaaaattcccctcaagtcaccagtccctggtatgggaatttttaactctgaaagcctttgaattattactaggaaaagcatctggtgttagtgaaaccagtgactgtgaagctggtatcaaaatgaaagtgccttttgggaaccaaaattttacaggtctttctgctgaactctggttcactgacagtgattgcttaagcttgtctaaaatatttcagctttactcttatcaacatgatttgtgctgtaattgtttaaaattttcctttgtaaaataactaaccaaattatctgattatagtttgttgtaacagatgtgaatcttattccacaaactcaggtgtgcaagaaacaatgcattactttattttcagaaatccaaattaaatttgatgctgagctcccattccaccaggttgccagaacttcaataattgtccttactggggtctttgccagctcatgcaaagtgccaggggaacattcagggaggattcttctttagtcattggatcccgctggttacctctgggttttccattgtccaaacccacaggatcttgtatctggtggctcaagactcatcagccatcactttggtagttcctggagtttggggttcagccttcttaggtgatccacactgtcaatccccccaggctttccccaggccctgtcgccttcctgagggtgccacaagccagtgtatggctggatagttgcagacgactgtgatgaaactgaggacaatgaaactgccacagtggagctggccacaggttctaccctcagaacccagacctctgtttcttcttgtttctgtaccccactgttctgctgctccctcagaaatttccccatttcctctgagatacctcaatgaatttaggtctccaaaaaatatctagggggaagtggtctttaagaaaattgtccttaagttttcctttttagtggccccactaacttgccctaaggcagaggagcacagaggcctcactatgtacttggatctgaagaaaggaacatatatatagtgcacatgctgtgttaagcatcgacttttcatgtaataatttaccctgccgtagtagctaacatgtaagcaaggcagaattatggtcccaactagacttttcattgagatgaaaactaaagagcttcttttgtcttattaaatgagaagggaaaaatctttcatgaaatagcaacaacaaatatacatgctactctacacgctttacatggattagctcctttcatgctcacaaccatcatatgaaaactggagcacagaggttaaatgatttgccctgatcctatggctaacaagtagcaggagcaaaatatggacccaggcggactggctccagagcccgtgttctgaccctacacactgcactgcctctctgctcaccactgtcccaccttttgtagtcccctgcagcttaaaaagagtgggaacagactgaggatgggaacagtccagtagtgctcagactctcctcagcaggcagggagcaaggcgcttcaaccacataatctacaatctgtctgtccatttgactcagctaatgaccccttcaccatcgtccatggaaatacgggcaagtgcatcaagccagtgtatggctggatagtagcagacgactgtgatgaaactgaggacaagttatggaagtgggtgtcccagcatcggctctttcatttgcactcccaaaagtgccttggcctcgatattaccaaatcggtaaatgagctgagaatgttcagctgtgactccagtgccatgctgtggtggaaatgtgagcaccactctctgtacggagctgcccggtaccggctggctctgaaggatggacatggcacagcaatctcaaatgcatctgatgtctggaagaaaggaggctcagaggaaagcctttgtgaccagccttatcatggtgagtattagagagggactttgaccgatttgctgttgtgcttgtcacatgtggcattaaacatgcacaatttagtaaaaatagagtcgtacattagtaagggcagtgagtaagctcttcacttccaggcactgtgcagttactttgagcgacattcttacaagtccatggtatttgcctctactttgcaggtaaggctaagagagataaagtgccttgtctgaggtcacacagccatgttgtgataaacctgggatttcatcagatagatatgtacttcttatgatggtcttctaaaccctagaggaaaggaaaccctagaggaaaggaatcattagatttgtacaggctaaaagtcaaatgatctaataatgttgatcttattctaagttttaaaagaagaagaaaggtcaggcgtagtggtgcatggttgcggtcccagcttctcgagagactgaggcagcaggatcacttgagcacacaggagttcaaggctgtagtgtgtaatgatcacgcctgtgaatagccactgcacttcagcctgggcaacatagtgagacacccatccttaaaaaagaaaagaaggagaaggaggaaaaatatattttttcttgcctacggattttgaataaaatgggaaaattttgagtggattttcttatttattttcatttttgcatggcaaccaaattttgatgtttatatttatgattcagcattttaagagtggagtttttcagttgcttccgaaaataagtatattaatattgccttgcggggagcggaccatggacttagccctgagtctagggactggattgcaactaatttctaagttaaagaatgagtagatttatttttttaaccattaaatgtaattagctatctcccaagcaaatatttttcattatgttgctctaaattacaccaaatgtcgatatgcatataattatgtcctctaagtcctattatttccccttgcctttctttacaaatttccctagctttacagtggctttcttcttctcttaaagatcatttaagctaaatttggcctcaaagtcactatagcagcttgctcccatactttccattatccatctgcacaagtttttctttctagctttctatttcctagtgaggatgcaagaattattctgagaatgtcaagttctgttgtggagaaatattagagaattagagatagggtttccttttcatcattccctggcctttgaatagttgacagtctgtttctgcgagccagtttcctcctaaaagtaaagcagttgctttttggatatgacttaatggcaaatttaaattctgtgccacaaaagcccttctccaacttgccaactaagaggaaacacagagccaaacaaaatgccttttaattggatttaacttgtttcattgtatttgtccagggatcagaaaggataattttcttggcagggttcttttagtctcctgatctaattcttttgaggggcatagttgtaatcttaaactccctcagtccccagtgtcttcatttcaatataactggttttcctttttatcctatgtattttatgtatgcatttctaatgttcttctgagacagggactgtggatttcacccagctgccaaagagatcagtagcacaaaaaaggttaaggatctacccaggggaccacccagagagagctaagcaatgccaccagcataacccaaaggcatgaagtgtttcttgaccttttcaaatataatatttgaaacactaaagctttttttaaagcatatatagttgtgactagtcaaggcatacctcaagttttaatttgcacagaaaccagggccaaacttgccacctcttctctgtttctgtctgggtgactggtaccatctaagttctacatgtcagaaatcagcaagtcacctgagaggtttcaggctcgcctcttccaccactccaatataatcaaatatgaagtcctggcaattctacccttttcaatttatgtatatcccttcttgttcttaggttagggactgctgtcttaagttagggactttctctaggactccgctctcagactctcgatactgattgttgtccccaccttcttatctagcagtatataaacaaaacatacaagatacccaagtcccaacaaagtgaaatccaaggttacctggtttgttacagcaaagctagggcttaaaaccagtattccattccccaaacatagcttctttctttcccccttggctttagcagtataaaccaagttttcacttgtgatacaagaacattaatttatcactgtgccttgggttgcctctcaccccaactcctatcctgtgtgagtcgtgttcatctcagagaaaactgaagttgtataaattttatgagtgaactgcttttgactagcacccaggtgtacattaatatcattaagataccttgatctcactagcacttttcaaattttgaatgtttggtgaatcacgcagaggaaatggactttttgtggcagggtggctgcagaactatcagaattctgggcaactcttagaagcctgccaacaacctctttatccattgaaactattttgtctcatgttactgatgacattaatttgctagttttctgcataatcacctcatctcacaaatttgtaactattgcataataaagctgttgttttaaggatgctatcatcataaatttgcacattcagagaagattcttcccaggaaagtctgtcttgctaaggaagcccatggtgtgtaagaggccagcatcagcaaagaatgtgtgggaacaaaatgcttagtgaatagttagcgtaatttagctgcttctggtgtggtggttgtatgcttatcattcttcaaagcatatattgtgacttagagagcttattaattgaagcccagctttgagctatgaaatttaacttgaaacttgagaaggcacccgctgatgtcacaagttgtccttataggtcaagagtctaatcagagagagcccattctcattcctgtcacttgcagctgagtgcctgaatgtatcacttgactactctgcaaaaatggggatttcccagacaagtataatacctcccctatgatctcacaggtttatgataaagaacaaatgacagaaatgtataccaaggcactttgtattccaaaaatcaaaggttttagaaaagaaaactgatggctctacaaggaacagtctttgtgttcagggactgtcctcttaggtttgtaatatgggaaaagaaactggtcatgagctattggggggttttgatgcggttaaactgaaacataggtaataagcagaatccttataaaatataaggtcaacacactctttaacagaagtacgcttttgaaaactgtttctatgacacagcaaaacaaaaccagtgatctttaaaagactatttgccaagaaaagcatccagattattattaccttttgctataggtctgcttattacattctaagctgttaaatggcctcacactttagttagacggacactggaggaaaagaaagtagaatcaaatactgtcttaagcacacttttaagcaaatctgtgagacatttggaggaaccctaattgcctggtaaacggtgataagatctgattactatgatttacctaatggccattatttgatctgttaatgactgaggtttttagcaaattgtggaccgaggttttggcaaattgtgacagggatacagggatagctgttctataaaaacacctttccaagagaattagtattgatataagtatcaaacattctttccagcatttccaggcatatttgaggttggaatcacttttcagttcctccccatgtaccagggaaaatgattgaagtaaaagctatgtctactacctcactggccccccgccggtcacatgactgccccattgaagctgctgcttctttcacaccccaaattaccatgccttgtaccttcccaagaatctgctcagaaattcagcagctcttccttttacttcctcaaaaaccacagtctcaattctacctccagtctctgaacaatgggactatttgtccatctttctaatgccgcaggtggttccaaagtccacacccaccctcagtggttccaaggaatttttctggctccaacactttctaaagaaaagaaaatagaggtaaatgtaacctcagccagggcaccctttctggtgaagtgctctgcggcccacagcagagttagtagaccctcacctgatcaagccaggctctttcagcgcctcatcacaccacagtaagtgaagcttcacatggttgatcactgaacgctatccccagtttgcaaaagcagaaacagaggctactagaggttggatagctagcccacaggcaaacagtgggttagcagggagccagcattcatatccagacctgacagcacccatgctctgaattcctacactcggatattgtattctaaacaacgtttcttttaaaaacagttttagaaattagccacctgacgctgactacccagtttttaactctcttttccccaacttcctctccaacccagagatctataccagagatgggaactcttatgggagaccttgtgaatttccattcttaattgatgggacctggcatcatgattgcattcttgatgaagatcatagtgggccatggtgtgccaccaccttaaattatgaatatgaccgaaagtggggcatctgcttaaagcctggtatgtatgggctggtaaattttatgtggaaaggtagtacatttatatgaggcaatagggagaaggaagagttcaaagtgactcaaaagtgactgcaaaaatattatcccggataagaagtgtatgtttggaggagaagagagaggtaatgtgtagccatgaatttgccttcagaagcaggcccggaagtgaaccaaggcggatggtgtcatggaggaggaggagggagtgttccatagcaccccagggagaggaagtgtggaaaaggcatgcacaattaggaaattgctgctgacctttagtagtttcagaagactagagggggtagaagctggattgtagtggaatgaagcatgaacagaaggaagtaagcctcgtaagtttcacggagcagaagaagagacagttggcaaaggacaaaattgcaacaaatttatgtagttacaatcttatttggctttattgcaattctagaatcaggcaacacctcatttcataaaatagactactgtaagtgttccagttcgttgaacagaggggattggctttgtagacagaaaaagggctgaagaaagcaaaaacagaaaccgaagagtggattggtcatttcaacgtaactttccttgtaagagcaatagagaaataattgattggtcaacatcaggtgacttcaggttaagcattgaaacagagggaacttcattatcagtccaattaaagattgaaactggcctgttggggaaattaggcagttgtctctctctcctgatttctcaaaagaccagatgacaatctgtttcagtttggtgatgtggaactttggcatgggtgactccattttgatttttgagtcctagatcaggagcttagtccaaaacagtggcttttttttatttaaaaaagcaaagggtagtttaagaaagagatcagttgaaaaacacttttagaatggtgaaatcttaagtatgtttatggcctgaagcaaagagcgggaaagagaagagatagatcttcctggctcaaaattggtgacactgttccttccaccattcctgtgtgtttgtcagagtgctttttctcgttactttttaccagaagcaaactgttcaggatttgctaaagaatttgctgttctttagaaagacagagagagaccaaagtagcaatcacatcattatctggcacataactgagacacagtttctcaccaattaggtgagagttacaggggatcacggtacctgacatgtgataggtactcacaaaatattacttaatggacaataggttgaaagaatctatagcaaagagaaaggaaagagctccagacctaagtaataatagttaatacttaacagggctctgccaggtgtcagatactgtttcaggctctcaatatacattaactcattcagtcctcacagcaaccctgaaaggtaccatactttatccccattttacagatgatcacagtgaggcacaagggagatatgtaacttgcctaagatcacacagctaataaatatcagaactagaattcaaacccaggaagtctggctatgaagtccttgtcccaaacagctacactaggctgactcattgagtagctagccaggtggtattagtaatgctgatccctccttcgggaatgtgagcttcagaatgcagaagctcttggagagcttggagagattatactgggttaagacttaagatttcagggtgcaacagaatcacatggagagtttgttagaacacagatatctagggcccagagattctgattcagtagatttttggtgggccccccaaatttggcaagtttccaggtagtgctgataatgctggtctgggaaccacacttggaggattacatatctaattagaggcccaggcttctcaacacctgtaacctacctactaaaatagaaaaagccagtattttcttcagctataattgataataagcagagtttggtcagccaggtatcaacttcatttaactctccttatcatttggatcagaaatttagatgtgaaagtttgcttagaggtaatccaatgtaaacccctgtttctcaggtgagaggcagaaggcccagatcagtgaaatgacctgtcagggtcagaccacatttttgtggacactagtgaaggattctttatcctccttccccactgtacatatttacccccactgtaccttgctgccttgacaggaatgtatcttggtgcctttagcctcctgtgggtgttgtgtgtgtgctggggctttgggggtgtgacacatacagtggtgttaatgcatgcatatgcttcctagagttactttttatggaagaagcaagagaaagtttctcaaacctgagggctgctaaatcatggaggtcatgttgtatagcaaacacactgccatcccactcctggaagcttctggatttacaagtgtagggcctcagtggtaataatgaacctttagacaatgtgctttcaaatccaccctattttgtttttatcaaatgtcagaatctctgttgctatttatgctatagaaaaatggctgaagcagcaggatgtgccatcagaggatcaacaagaccagtgccctcattatagctctgtcacagtcacctctaggtctttgttcctgtctgttaaataaggacattagacaagatgatctctaaaggcccttccagcttataggatcatgagtataacatctgatatgtaactggctataggaggccttttggaaagtcccccagttggagcctgggatgcacttgacacagcctgcattggacttcccctcttgtggggagtacacaggaggctctgaatatattttgaaccagttgttttgaaatttttatttctcattcaggaaacagcttgcagtttctttgtctgaaattatgcatactctacaaacacatatgtatatatgtttctatgcacatatatacacacaaatacatatataatgcatatgtaatgtgaattacatatcatatattctttattaaagtattaaggagaaatttggacatagtttcccaaataaggtagtcacttgggctcaatatcttggccatttaagcagcatgtctgtgcacacacataaacatacagtggtttttatgcaggctgtgggcaaaccctctgtcatctgccactatgttcaaatgagcttgttttccattagctcagtgttcacaacatgtgcacactgagacccatatctcaggcagagggcagtcagggacatgggcgaaaacacagcattgtaattgatagggataaaaggagaatggaaaataagaaagagtggaagcttcaaccagcctgagtcatttggtgtgtcatgattccaattttattgtgatcaaaatatggtctaaatgagtgatggcagtctccctttgggcatatcctaagagtatgcaaattgacttgcagtatttctaagcattctaagtaatagaaaacattatgtccttactttatgatcactaacgtgtctttatcaacagaaaacggttgtgaagataattgggaaaagaacgagcagtttggaagttgctaccaatttaatactcagacggctctttcttggaaagaagcttatgtttcatgtcagaatcaaggagctgatttactgagcatcaacagtgctgctgaattaacttaccttaaaggtagattttatttgcatgtgatagagcaaattggctaaaattgtaaaggtacttcttcttctgttttcatatccagatgtgtttctttgtatgtaacttttctgacctctcttgggatttaaacttctacactgaaacccataagcaaaaaagtactgaatgtaatcatatttcaccattgagaaatgtatcttgtgatggaaactaaagagagattgatgttcagaaaacaaggttgggtagcaagattaaactgctaccctaatcctaaatgaaaggattttcaaaaagcgaataattaaactctttgaacattgaaaaatagagaattaaaggaagggaaggaagatggttaagttacactagatggcctcagtaaacatccttacattgagtgaaagggtacagtcctcaggggcaaggagtgttttactaaatcttaaagtggatttaataacatggacacagaatgggtaggactttgttttgttttgtttgggggatggtagtggtaattttttaatttttaattatgaaaacttaatagataagaataaataaaaactttaaaagaccatttatcctatcataagaatttaagtatcaccttgttaatttcaataacaaaccctattggaactttgattggaattgtattgaatcatagattcattaaagaggaattggccaggtgcggtggctcacacctgcaatgccagcactttaaaaggtaaaggcaggaggattacttgaagccaggggtttgaaaccagcctgggcaaagtgagaccacgtctctacaaaaaaaaaaatttttttttaattggctgttggcatgtgcctgtagtcccagctgctctggagactgaggtagaaggattgcttgagcctgggagattgaagctgcagagagctatgatggcatcactgcactccagcctgagtgatagaggaagaccttgtcttaaaaaataaataaataaaaggtattgcagtttcaatattgtcttctcaaccatgaaaatgatatgcttttctatttatttaggacttcttttatgtactcagtaaaattctataactctttccatagtcttgtatatctttcaaaagaaactatataaacaaattttaatattatatttaaaaatcaaggaacctaagttactgagtccctgatgagttattctttgaatgaaagacaaataattgtaatatatgataatgatgatgtgccagacagactactaaatgctttttatacattatctcctttcatcccatctaactaccttatgaggtggacgttattgttatcctcattttgcagatgaggaatgcgaggctcagagaggaaacataacttgtccaaagtcacccacaagtatttagcagagcctaaatttgaagagtcagtttgacttgaaaacaaattgtatcacacatataaatggattcaccttttataagactgtaagttctttgcaggcagaaatgggtctcatgggttgtttttcacttttgcacaaagctgtaagctttattgctatatattaagcaaacatgtattgtctaagtaattcagatgcattctgtcacactattttataataactggaaatatttgataaatgcttactgtaagcaagccctactttctccagataaatccattaatcattactacaacctcatcaaacaaatgttttatcactagataaggaaattgatccttagaaataatatacccaacagcatacagctaagaagtatcagattgggatttgaatatcaacatatagaattgcagaactctatttatgtgaaagagggtctcaatatgttgcccaggctagtgtgcagtggatattcacaggtgtgatcagagcacactatagcctcaactcttgggctcaagcgatcttcccacctcagtcttccaagtagctaggactacaggagcacaggatcatgcccagcttttttgttatactacgtacccctcttagatatctttatctctttttatcattaaaaggccacaggtcttttgtcgctctttttgtttacagctttattcagacctcctttcttacttgtagctttacccttttcctgtattgtttggcacttgaatattcagatctttagaatgaaaatctgccaaataagccaaatgagctagtgtttggcattggagttctattccagacctcactgaagcctcagaaaaaatattgttgcgaatgaaaagtgccgataaattcaagtttcctagaatattgacatttggaaaccgatgacttcagtgaaggagaaaagtgccaaagtgtgacaatcaaatgttgcacgattctttatgcatcagttttctttaataactcatgaaagtaatgtaatatggtaaaggaccttattgtaccctactcctggccggacatgccccgtatttaatacatatcattaattttagaagtatatctgtttctaatgtttcaagttcctcttccagtgtgaaagcttcttaggcatatcaatacgcctaattatgactattggtttcccaagacccaagaaaactgtgttttaacctctaaaactctgctttctatctttctttcttttttcttttttttttttttttttgttgttgttgagacagagtcctgctctgccacctaggatggagtgcagtggcacaatatcggctcactgcaacctctgtctcctgggttcaagcaattcttctgcctcagcctcctgagtagctgggattacaggcacacgccaccacacctggctaatttttgtatttttagtagagacagggtttcaccgtgttggccaggctggtctcaaactcttgacttcaggtgatccacccgccttctatctttcttaattgctgatagcatctggtcatcaaataacaaatttgaatgatctatctccactgtaccacgtgtgtgtgtgtgtgtgtgtgtgtgtgtgtgtgtgtgtgactctcactctcattctgtatctctagtctaaacaggaccctttgggccctagagccataagccacatatatatatgttatattatatataatatatatatatattccattgtctatgaaacagctcctatacatatttctgacccagtcccagaaaaacttgatcatatggggatccatgtctgtctccttctactagattgaaattctcatgagggcaaggactttgtcatttcagtttttacatccctagaacctggcaaataatatgtgtgcctaatgaatttaaattgtcagtctagaatacagtcagatcttctgaatctagaagtacaatggaaactgcttttgataagtcttctatattaataaaagaggattaaaaatagatagtgagacagctactctaagaagcttctgtccttaccttagatgaaagggaatttgacaagctaataggagagcagaactgaattaacttatcagcctttgggtttctcaatagtctgaagatttttgtctattagcattgcctacctttgatgcataaacagccctctacagggattgctgccttacaatcaaggtctgcagatttgtttgttattagtagaataagtctaatttagataataacttaggcaactttgtcactttttaaaaattttttaattcttacagaaaaagaaggcattgctaagattttctggattggtttaaatcagctatactctgctagaggctgggaatggtcagaccacaaaccattaaactttctcaactgggatccaggtaactgctctttccctaccccctctgcacagaacaaatcttcaaaaaagcaaaagcttctcactcaccaatagcttagaaaagtttcacatcttggcagctcttactatggttacctctcagaagaattttttcttcctaaaccattcttaattgtggtactgttattgccaagctgaaccacaccatggacaactgagcatttgaacctctagacctttagaacaaccctacatttttatgtaagagcaaaatgagctccaccacatggcccaggagccattctatgtccctaaaggacttggcatgtctataactcacccatgctgtgtttcatctgcagctgaactctaatatggaattatccgctcgttttcaaactcttggggtctctccccactatagcacccaagtactgacaatataatggttgtattttataatacaaataaatacctcaaagaaagtcttttagggaataaaacaagcaaaatgccacttagccaaaaagcattcttcccaaaggaaggattagacaactttgaaaaataaaatcttaggcttatgacaaatgtagaacctaaagttaacactaatttcagtataaagctgcctgcacacatagtaggaaaactgagttaagagcaataaaattcaaattagccactttagttaatttagtttgctaaatttccttaccagcaaatgaagtaatacttttattatttcagtaaatagaatatttaaagataatttaatctttaactcaaggccttaatggcatgacaatgataaattaatatttttattttatggagtagcagattaagagctactaagcatagaatatggcctggaagtcatttgaggaaaaagtttggtttttgtttttaaaattaactacaacatatcatgatgttttccctttagattctatattttagaagaaagacatatttaagcacataattattcattgaggcttatacgtttcaatttagttaagttttaactataatatgagttcccataaaagcataaaattaggaatacaaattattctttctgacaccatcctggccctaactttctcattctaatgctttgaaaaatgttcccttttaagacaggcccagtgcacctactataggtggctccagctgtgcaagaatggatgctgagtctggtctgtggcagagcttttcctgtgaagctcaactgccctatgtctgcaggaaaccattaaataatacagtggagttaacaggtatctttctcacatactcatacaaatagacaaataggtcttaaaatcatagttttgtgaaaacaagtaaatcttttccaacatccgtttccacctttccttctcctgatactgacagtacagaaaagtacttgatttttaaccctgtggttagatattatcaaccatatatgaataaagctttatttgaggtaatgaagaatattaaatataaatatgtatgcgcccagaagaaggcagagatattcgagataggaaatatacttctgttcgtgtgtggctcttttttctccagagcagtggttctccaggggtggtccccagaccaacagcatcagcatcacctcttcctgttagaaatgcaagctctcaggacccaccccagatttgctacatcagaaactacaggatggggtccagcaatctgtattttaagaaactttccaggtggttctgatgcgtattcaagtctgagaaccactgcagttcatgcctccgtaatgaggcaaaacctatagacacaggagtaagcccaggcttctctaccttgtgccccacagcacccagccctcttctatccttctctgtcaggcaagtctttgcattgaaaaatcaagtaaaaaaggagaggtgcagagggacaaaatgtgtacaataagggggtttttccagggtgtttggggatgaaagtgacacaagaacagctgaagtttttgaggagtggaagggtgtgaggagtttttgaaagaatggagaagaggagtgtattgactgtcaagcacagggcctgatgtatacctggtatttaattacatcctcaccaaatgagagaaactaatactcaaagctggagggatgtattcatccgttttcatgctactgataaagacatacccaagactgggaagaaaaagaggtttaatggaccttacaatctcacgtggctggggaggtctcacaatcatggccgaaggcaaggaggagcaagtcacatcttacatgaatggtggcaggcaaagaaagagagcttgtgaaggaaaactccgccttataaaaccgccagatctcatgagacttattcgctatcacgagaacagcagggagagacctgcccccatgattcaattacctttcaccaggtccctcccataacacatgggaatttaaggtgagatttgggtgaggacacagccaaaccatatcaaggggaaaggatgatttttaaatgtcctgctttaaggaactgtgagtgaagggaataaagcattcaaatgtcttgtcatctaaaaaggagtatagagcaatttttaaggaaaaactagatataaaataaagaatctgaggggatattttaagataataggggaaatgaacatttgtcttccaagttgattcaaaccaaatttagtccatacaacaaaaggcataatagaaaagccagcacaaatgaaaataaactagagcaattgatgatagattaagtaaataccttgcagtagcaattattaaataaatcatgatgtttccacatgattgaataatatgcatttactaaaataactgtgccagcaggaaaatacaaagaacaaaaccaaatgatatgcctacttatcattttaatcttgtaaaaatatgtattcattgagacaaagactagaatatgaaaatgattgcattaagttccattatgggtgatatttttcctctgttcctttatcataattataaaatataacaataatacatgctatttcagaatattaaagttaattgagttatctcgcaagtgtaagaggctagctgaatctgaatcactttatcctttagtaaaaaaaacaaactgtccacatttttttttctttttttttttaattatactttaagttttagggtacatgtgcacattgtgcaggttagttacatatgtatacgtgtgccatgctggtgcgctgcacccactaactcgtcatctagcattaggtatatctcccaatgctatccctcccccctccccctccccccaccccacaacagtccccagagatgctgtgttttcttacaacaaatattccaaatggttctaaatcagtgaagtctgagtaaccaactcactttctggttttgttaacggggatagaagtattctgtggggtttcatacttcattctttttttctaatctggaaagattagaccttcgattgtgagctttctcatggtcaaaacagaatcactaattccatgaggaccatctgtctagcagaggggaggaaagaagtccaggggtaacctttgccctctcatctcttggatgcgaagtgtataaatgtcttattctgtcccttaaatctctgcctgtcctttgttcaacggtgagcgttaatctacatccccttgctaagctggccatacaagaaaaggaggcttgccctcttataatcttctcaaggacagagactggagggaaacctaacaaattccatatccaggaaaaaatttgtcagaaaatgacttaaggcacatctttctactgtctacttggactaagggcaatctcccttgactgtgtccaagcccttaatagtctgtgctcagccatatagcacattgaagcatgttaaagtcacatcattttctgaatcccagcgggaattcctatgatgctatatatacctcatttatgtggtaggcaccacatgaattcatgtcaccgtagcatctgacatcacgtccccagttttccaggactctcattattcaagaaaaaagaatttgcaatgttattgattcacaatagatgtatctttactggaatataaatagctgcttttcccccagatgtctggacatactcagatacccgctgtgatgcaggctggctgccaaataatggattttgctatctgctggtaaatgaaagtaattcctgggataaggcacatgcgaaatgcaaagccttcagtagtgacctaatcagcattcattctctagcagatgtggaggtggttgtcacaaaactccataatgagggtaagtttttaaaaataccctatttgagaggcttaagccattttaaagtatccctggttttagactctttgtgggaatgaaaagcttacagtttgatcccacagatcagccctgtcagataggattgtctctggtgatggaactgttctacaattggtctagtatggtggtcactagcaacatgcagcttctgagcagttggcatgtagccagggcaactgaggaactgaattattacttttatttcatcttaattaatttaagtggccgcatgtgcctagtggcaaccaatttgacagtactgccattgattgatttccctcttctcatgagctaaattctatttaagttgctcaaaaaacttaagtgataattacttcacttttgtaattatttgaaagctaaagactggtaaaggaaaatatactagacggacagtattatgatctcttcctagaatagaactcttagctagaatagctaagagtaggtacctactcagtgccagcctggtgctccttgtttcacttgtgaaggcagcagagtcataccagggcagcagtggacagtatttctattcaaattgggatatgtatgattgtatttatagaatttcattcaccccacaaagcaaagtttatctacaccagatatcaggaacacccagcctgcagatgttctacctgtgtactttacttgcataagttacttgaaaagccttcattacccaacctgcctgtcgtatcaacatattaataaccgaattaagaatactacaaaggctcttaaaactccatatcagaatataaaaatttgtataacaatgtacatattacagtatttaattgagcaaaaccaaacaaataatacatttttcttttagatatcaaagaagaagtgtggataggccttaagaacataaacataccaactttatttcagtggtcagatggtactgaagttactctaacatattgggatgagaatgagccaaatgttccctacaataagacgcccaactgtgtttcctacttaggagaggtacgaaacctcctgtggtttctttatattcttcctgttttacctaatgataatattaagacttctttggttgggaagtttgcgtataagctggaaaataaaaggtaagagcactctggatcagggtacagagccacggaccattacctgttaagaattgggccgcacagcaggaggtgagcggcgggtaagcaagcattactgcctgaactccgcctcctgtcagattggcagcagcattagattctcctaggagggtgaaccctattatgaactgcacatgcaagggatctaggttgcacttccttgtggaacagtttcatcccaaaactatcctcttccccaccctctgtggaaaaaattgtcttccacaaaactggtccctggtgtcaaaggttggcaacaaataatctaaagtctagactgtctttctggtagctactttaaaaaggtaaataaaagcaattactaaataagcaacccatatcctatctgagagcatcttttctggtctcaaacagatacagagaatccctttagaactcacattcttgtgctgactgattctagcaacctgctttctctcaggaccagggcctgcacccacctttctgccatcagtgtgatattcggcagatagccacaatttaacctgaaaaatcccatcttccaaattcatgttcagattgttttatatcgatactactttgagaagtaaaaaaatggttttatttaaaaactaggcctaacatttttcagaaaccaccttactcctatagaatgcttaaacattttttgaacatcttttacttaataatccaaaataggctgtgtcttgagcagaaaagatatatgtacctctacgttttgtttgtatcactttcctgtggacccctaattggttatgaaagtgactgtgtcactcagacatctaaagagacttaagtggaagcaataaatattatgtgtatttaaaagaagtttagaaaggtgtcacatttgatgctctatttaaaaggacatccaacatgtctttagaagaacatcagaaatggaaaagtgttcccatgggcaagagtgaattgatggcatacctagacagcattccaatgttcaaaactgacccttatcacaatcgacttattagaatttaattcaaacaaagcaaagtgacgtagtcaattaagcaaattaatgttaagtagcatatatgaaagagagaattttgaagtccagattgaagtagagttgaaagaaacttttgacctagaattcatggagaatagctattttagccaccatcatcattttacacgtgaggaaaccgagaaagggaggttgatgatgtacctaaaagtttcaaactttggctatgccattctagtctagaagactagaatgctggaactgtgggctgagttcttctctcttcaacttttatactaagtgtgctttgatggttttattgctactcttataagaaaatgaaatttatccacactgtgacctggaggtgatgctgaggtaactggctgtgagccatcactttgcaggcctgttgagtagcattttctaggagtgtgttctcacatttgataattcacttatattcatttctctctctctgtctctgtcatagtttttgtgagttcagttctgaatatgcggtaaataatttcctttccaagcaaatgtttttgtctcctttcaaagctaggtcagtggaaagtccaatcatgtgaggagaaactaaaatatgtatgcaagagaaagggagaaaaactgaatgacgcaagttctgataagatgtgtcctccagatgaggtaggtaaaatccctatgtaaattttctcaagcagtattacaacttcttggttagaaatggtagctgagacttaaataactcagacttataaaatagaggaaactactagcttctgttcatttaagttagaacaagccagaaggcagtgagtcatagcatattggccttcttacagaagcagaaacttgaaaatttctataaatatttgtagaattactatcctcaaggctgatgtctttacttcccccactaatatcaatattcaaaaataattcatccagtgaatattatactcttatgatgagccagccacccatatgagaagtaacccatactttttgtctgacacaggcccacagtcttgtggaggttatctgtgaaattgcatcccaccctcatcacatgtatgatttcaatagccatgtcctcaatttccacaagttctaagacgttatcaatgtagcagaaacatgcttgccagacgggacaccatcaagtctggaaaagagtttgacaatatttttcctctgacttagggctggaagagacatggagaaacctgttacaagatttatgaggatgaggtcccttttggaacaaactgcaatctgactatcactagcaggtgtgaccatcagtaaacttgtactcataaactttcaactctgaattcttttgccaaacagtcttcctaagtaaaaggtgcatcttcaaatagagtcaatcattgtgaaacacttgccaatttgattctccttttgtagatttgagcaagaatacctaaatgatttgatgaaaaagtatgataaatctctaagaaaatacttctggactggcctgagagatgtagattcttgtggagagtataactgggcaactgttggtggaagaaggcgggctgtaaccttttccaactggaattttcttgagccaggtgagtgtcttaatctttgaagtagtagtatactgtgactagtgaaaggcagcactcctcccaaagatgttcctcacttacttttgaaatgtgagggacatgatgatcttcaggattggagtctatctatggaaccataaatagaagcagtggctatgtcttccctattatgtccttgggaataatccaatgaaagaaattcaaaaacttagttctcccaaaccaccatctaatggctcagagctagaagcaccagtgtgagtttttaaaatcttttccatgtaaatctcaaatagaatctagaagctcccgtgtgaggctctttacattttcatctctctgcttcttaacctattttcaaaactgaatgtgttttcttccattattctcaatgggtaagaattatggaggctatcttgtattatttattttgtttttgtttttgtttttgttttgagatggggtctcactctgttgcccaggctggaatgcagtggtgtgatctcggctcactgcaacctctgcctcccaggttcaagtgattcttctgcctcagcctcccaagtagctgggattacaggtgcatgccaacatgcccagctactttttgtatttctgtagagatggggttttaacatgttggccaggctggtctcgatctcctgaccccaagtaatccatctgcctcagcctcccaaagtgctgggattacaggtgtgagccactgtgcctggcttcttatttattttgaaagttatttcctctttctccaaccagcctaaagcattgaccataatttgccatagaatcagaacacttaagccggaaaggacctcagaaatacttttagagttaagaaaacagagactttaaaaggtgatttacttgacaaagatcatctggttattgaattaatgaaatccagagttcctgatttttaagccagtggctttgaataagacagcagtataaagcattctacttttcaccctgtgaattatttatattttattgtgttggtctaatgtgatcatgaagactattttttataacacagagattggaaaatatgagcttacaattgaacatgttatttgaaatagaaaatgcccacaaaagttaggacacatggtcatcaccatcaacatgagtgatgttgctagtaacaaagtcatccttttatgtctgaaaaagatagagtatacagatgttgatcctggttaaatctcagattaagaacactctaatggataaagcacatagatttctttttttctttttcttttttctttttttttttttttttttttttttgagatggagtttcgctcctcttgcccaggctggagtgcaatggctcgatctcggctcactgtaacctctgcctcccgtgtacaaacaattctcctgcctcagcctcccaagtagctgggattacaggcacctgccaccatgcccagctaattttttttgtatttttagtagagacggagtttcaccattttggccaggctggtctcgaactcctgacctcaggtgatctacccacctcagcctccgaaagtgctgggattacaggcgtgagccaccgtgcctggccagatttgttttatagacactaagagtaaaggtgacgttcttgataactaagtcttggtggttggagaggtgcttgggaagtagctaccatgactacttcctccattctatgaccagaaaggctatgtgaagctctctttaccattattgcacccatcctcagccaacttggtctatcatgggcacaccgtggatagaaggactgaacagggaaaaatagcacacccattcagggtagcaaggcaattatttttcccagtttcttattcctcttgctgtttgtgtatatgagactatgtggcttctctgtttggtgggatagaagttgtcctattacttttcagtatatgtaactcttcttgtcttttacctgcttcaggcagtgtgatgtaatggaaaatggaacatgatgttttgtcagacaaatctggtttcaaccccaactctaccattcactaactctgactgtgggcaagttacttagtcttcatttacaaaatggaactgataattcaaactaccttttaatactgttatgaatacataaaattatgactgtcataaaattaacggtaaacaaatgtatgttaccacatacctccttctacctttattgtaccagcttttcctttggatcagaatctgggagagttgtgttttgaggttaactaagtttcttaaaaactgctcaaagtttttaagctaatttgaaccactatcctaagcagcagtagtatttagggtacagctctagaaacagaccacctgggcacaaatcctggggcaaccacttactaattctatgaccttgaacaagtcacttcattctcactgtacctcaaattatgacaatagaatccccccataggtttgttatgaggattaatctttttcaaaaagtactttacaaataataaacacctgtcattattattctgaacaacatatttctttcctctctttgttccattttttttttattctctctccccaacttggctgaagtaaagagtagaaacactagaaaatgtttgaactttaacgttttaatttttaattgagctttccacttcaatcccagcttccccgggcggctgcgtggctatgtctactggaaagtctgttggaaagtgggaggtgaaggactgcagaagcttcaaagcactttcaatttgcaagaaaatgagtggaccccttgggcctgaagaagcatcccctaagcctgatgacccctgtcctgaaggctggcagagtttccccgcaagtctttcttgttataaggtaaagtgacattctcattctatccttcaatgaagttatttttccactacccttgttcatgtccttgtacaaattatgctcttctccatagtactatgtaacctaactaaagtgctctggagcacagagtccttggcagggcatcgctgaacctctggtgtgaggtgcctcagccccacaccctgcacgtgtcctacctgaaagggcaggcccaaagccagaagtggctccaccccaaggtctttttttcccagtaagttggtgtactatatgccatactgccactatgcctatgatcctcatattcctctaattcttgttgtcaaattaacagctccagcactcctaataatgtaaaaaaagtgtatatatatttacacttttacaaacatatatatatttgtgtgtatatatacaaatatatatatttatatatacaatatatatatttataaacatatttacaatatatatattataaatatatttataaatatatttacaatatatatatttataaatatatttataaaatatatatgtttatatatttacaaaatatatatgtatatatatttacaaaatatatatatatttacatatatttacaaaatatatatatttacataaatttacaaaatatatatatttacatatatttacaaaatatatatatttacatatatttacaaaatatatatatttacatatatttacaaaatatatatatttacatatatttacaaaatatatatatttacatatatttacaaaatatatatatatttacaaaatatatatatttacatatatttactatatatatatttacaaaatatatatatttatatatatttacaaaatatgtacatatttatatagatttacaaaatatgtacatatttatatagatttacaaaatatgtacatatttatatagatttacaaaatatgtacatatttatatagatttacaaaatatgtatatatttatatagatttacaaaatatgtatatatttatatagatttacaaaatatgtatatatttatatagatttacaaaatatgtatatatttatatagatttacaaaatatgtatatatttatatagatttacaaaacatatatatatttatatatttacaaaacatatatttacaatatatttatatatatttacaatatatatatttacaatatatatatttacaatatatttatatatatttactatatatatttacaatatatttatatatatttacaatatatatacgtttatatatatttacaaaatatatatacgtttatatatttacaaaatatatatacgtttatatatttacaaaatatatacgtttatatatttttacaaaatatatacgtttatatgtatttttacaaaatatatacgtttatatgtatttttacaaaatatatacgtttatatgtatttttacaaaatatatacgtttatatgtatttttacaaaatatatacgtttatatgtatttttacaaaatatatacgtttatatgtatttttacaaaatatatacgtttatatgtatttttacaaaatatatacgtttatatgtatttttacaaaatatatacgtttatatgtatttttactatatgtatatatttatgtatatttttacaaaatgtatatatttatgtatatttttacaaaatgtatatatttatgtgtatttttattatatgtatatatatttatatatatatttggtctgcatcagtcagctagttccataaacaaaccactagatgccatcccaaaattcggtggctatgacaacaaacatttagcctcacattctcacagatcttcaggccagctagagtttgactgatctagtttgggcttgaatggtgacctctgctcccaacttcaggtcagctgtgctgggctccagcccttccttctagagctcaggctaaaagggcaacagctcacaggggtttgttgttctcatggtatatcactggagcccaagaaggcaagccaaccatataagcacatttcaggcctctgctcagtttaccttcactaatatcccatcaacacagtaagtcatatggccaagccccatgccaaggtacaaagacgtatactccgcccaccagggggctgtggcaagaccatctaattatattacaaggaactgaagaattgggacaaatataattcatcctgtcattgtgtcatcatctcttcttcctcctctgcctcctcctcctcctctttttcttctttcttctttcttctttcttcttctttctttttctcctttcttcttcttttgaaacagcccaagttccaggtttacttttgccactttctgtcaatattcacacaccagtgcagactgctctttggttgttcctcgtcagaaaatagtgctatttttgtgtgggtcactgtgtcttatattcgaaatttctattgttagcacatttctttgccaaaggctactcccaaagcatttatatgtatcctttacagccttgcctcctggttcattttatctttcaaggtcctaggaatacaggagaacgtggatcttgttggaatagttccccagcctggctgaggaaggccatccatctgaccacaaggactggcatctgtgctggcctttagttgaattgacactttcagcaggacctgtctgtgtctcagtatatgtgcatttacctatgccttcactacacctttaagaattcatttcaggggcccacacatgtgacagtaattgactttagcactatgaaatactttatgataataccataaaacaaattaatattatattttgctaaggtattccatgcagaaagaattgtaagaaagaggaactgggaagaagctgaacgattctgccaagcccttggagcacacctttctagcttcagccatgtggatgaaataaaggaatttcttcactttttaacggaccagttcaggtaatactttaagaatgagaatttctatgctgaatttgatgtcctctagatattcaaaattgacatgttcttaccctcactctctgttggaaaaaaaatggacatgttttattatctaaaaggtcatttggtgcttagcagtcatggaacattaagcactcttaatgtgcagacactatgaggaatctaaaaatgaatgagatgtattccctaccctttgtttaataaagtccaacagcaatgtatggcagaaaatctagaatataggcaaggaagggccttgggaattcagaggagggagggagtgtttctgggagtataatcaggaaaaatgtcataaagaaggctgattcttggaaggtaggtattatttcaaaaggcaagataggagaaggagaaggagccagaaaaaaaacagaacataagcaaaggaactaagaccagaatatacagatatggtcaaggagaaatgagtcatacaaattagctagaaaatggaatttggatatgaaattggaatgtccttgtttgcaagggaaggagtttgatcttaagtaattaaacacaaccaaacaaaaaacaaaaacaaggtgcgtgtgtgtgtatttatatctacacacactcacatatacctgcatatatacatatatacacagagaggaaggggttggccaggctggtctcgaacttctgacctcaggtgatctgcccacctcagcctcccaaagtactgggattacaggcattagccaccacacccagcccattatcagttttgattaagtgtgagtctgcaaatttgttcaataataataaagtccaattctgcacttttgaaagagacttaaaacaaagcttgccaattagtacttatccagctctaagactataatgttcttttcctgggaggaaggggccacaaaatactacaaaattgtgaaattctaataaaaatccttaaaaatttaaaaattttttaaattttttaattttaaaaattaaagcaactagcaacattttcattgtgcaacagataaaagttagtgctgagtagctggtggcctcctgaaatggggcctgactctccaatttgccaggtctctaatttattacttcttgaccccacttcacttgcttatgttatgtgcttgtcttatatttactcaaatagcaattgagttaataatcacaagtcatgtgatcatcttaataggtactgaaaatgcattgggtaaaatccactattcattcctggtttaatacataaatatacacttatatttagtaaatataactaatatgtaaattcttatttgaatagaagaatagctcaaattaatagccatatcacacttaatgatgaagcattgttaagtgcatttccctgaaagtcagaaaaaggtaagtatccctatatcatcactattgttaatcttggtttgaaattcaactcctgcacattaagataaaaacaatactataatgtgtaaatgtttatatatattaagcagaggaaaagacagattatcaaagagtaaaaaatatactatttacatttaaaactagactgcaaaaagggtaatggctattatatctctaggaagtaagattttgagtgatttttaaagtcttttctatgggctgggtgtggtggcttatgcctgtaatcccagcactttgggggcctgaggtgagaggattgcttgaaaccaggagttcgagaccagcctgggtagcatagggagaccctatctctatttaaaaaaaaaaaaaaaagaattagctgggcatggtggcacacacctgtagtcctggttactcaggaggctgagtcaggaggatcacttgagcccaggagttcaaggatacagtgagacaagatagtgccactgcactccagcttgggcaacagagtgagatgctgtctgtaaaaaataaatgaatagaatgttttctttgaaaatttctatattttccagatttgctttttgttttgttttttgagacagtcttgttttgtcactcaggctgaggtacagtggcatgattacagctcactgcagcctcaacctcccagactcaggtaatccccccacttcagcctcccaagtagctgggactacaatcacatgccaccacacccagctaatgtttgtatttttttgtagaaacgggtttttccatgttgcccaggctaatctcagattcctggctcaagcgattcaccttccttggcctcccaaggtgctgggatcacagatgtgagccacagtgcctggcccagatttgctctaatatagcttctgctgtgtttttctcattagagaatgtagtttcactacagtgtactgggaatctaatgcaaaatatgatacctgtgttccataaatatttatttattaagcatctatcgtagaatctcaggtattctagacatcattgtccagtgttagaaattaatatacaaaatttcactgcagactgacccaaggcaatttgtatatactaaatactaactcttgggttctttgtgaggtgagtgttagctattccctcaaccttgagaatagattataacaaatgcaaaattcagaccaaaattttccacacatacagacatttgctatgcaaacattcattgaagcagacacaaaacattttatacaacgtgttttgtaagcttgacaacattccagcaatctgtcctttttggtgttttaactatcaccttgcacagatttacttgaagcagatgtggcagtgttctgtggcagcattctgttcccattgtagtgagtatcaggccatcacaatcacctgacccaatgactggatgtggggttgtttcgaatcaagccctactaagatacaggctgcggcctcgcaagattctaatacactcttgagaagtgtgagagtttctctaaatattttagctaatccctgcatctcaaataacttatatttcaccagtgagagcccaatcctaccatcatgctgatgaacaagcttccgatttcactgacattaacccagttctcacattcattctgctcatgaccaaagcctccagtgtgactttggtgatcatggaagtcctcatggtggccacctctggaccatggcctttctttttcttttttttttttattattatactttaagttctagggtacatgtgcacaacatgctggtttgttacgtatgtatacatgtgccatgttggtttgctgcacccattagctcgtcatttacattaggtatttctcctaatgctatccctcccccatcactctgccccacaacaggtcccggtgtgtgatgttccccgccctgtgtccaagtgttctcattgttcaattcccacctgtgagtgagaacatgcggtgtttggttttctgtccttgcgatagtttgctcagaatgatggtttccagcttcatccgtgtccctacaaaggacatgaactcatccttttttatggctgcatagtattccatggtgtatatgtgtggggcatggcctttcaaatacaccaccaatacttcctgacatgtaagtttcaagcagggcaacttaatggcccttagatttcaagcttgacacacacaatatcatattatccagataaagtatttttaagtaaaatgctgacataagctctagattccaagcaagaggttagtaactctaactggaacgaggagccatggataagtactaatgaatgaggttgtagatatttgtgagaaacaataagtagaaaacattggaatatcatatgtgatagaaatgaccattaagagcatccatatacagaacgaattacactaggaaacaaaacatgaaaggaaatttttatgatttgtttctttgttttgaatcacacttgttgagcactcccttctttaaaaaattaatacaagttcattatataaaatttggaaaatataaaaatgagtaatgaagcaaacaatcacctcaaatcctagctcctgattataaacatagtaaacccttagtgtaaaccctttctgtttacttacatctctacacatttagcttttacaaaacctattttccatagaatgtactatgtttaatttttttctaatcataaaagtaatgcacattgaatttagaaaacagaacagcacagagaaaaaacaaatctccttaatcccttcacttataggaactgtattttatttgtactctgatcctagcagttaacacaatgccatggtaagcagactgctttgtttgcttaataacttctccataataaagaaattgtttgcctgtgctgtgcttagagaacatattctaaaaccaaaattgtaaccatggcttaaaggaaagaaggaagcaaacccatttatattagaaaatgattctaaagcatactccttgaatgccttggctttttattgcaggaattgacctttctcagcaagatatccattgcccaaattgtgtattgcatgccaaggagttaagtcagattactgctgtacctctcacaatctaagttccacatctctatttgtatttcagtgaaaaggattcatggtgcaccaaatcattaaggctctgagatctttgcaactcttaatggcagcccaacagggacagccactgtagggcaaaaatagccataggattagagaagaaagccttgtttgcaatgccattgctgctgtgtacactaccccctgtgatgtggcaagaatggatttagacataaatctaaggctttgtagaataagcaccctcatcaaatagtatttattggggcttatggctgagatactgttttccttagcaaccaaatgcagcaggaaatttgattgagaataggaattttaacacaattacacatattaaccttttacgctatctcttcttaacccaatagttttaaaaccatatacttagtgcttggagtaccaggaacttataaagagagagagggaatctcagtttgacttgattccccagttatgatcaggtgcaattttttccttcacattttctaaaatcaacattggaagtgtgcaatgatcaatgtgatatccaatttcttcttccctttatctgcctacagctaaactaggccaaaccaggaatgagttacaattgaggaaatattttccacttctgatcccgcacaaaaaaaatacatacatgtcgctattattttctgtatttatgacatgctagtgagttctttaaaatgaagctgaaatctgtaaatttctgtgttcaaatgaaacttttttcaatctgtaaatttctgtgttcaaatgaaacatttctgaaatacagtttcagaaagtagtggagattagaaattttggacaatcgagcaaactcttttctgtaggaagctgtcctctgaggtgcagcaaaggagccagaaatgggcttgaaagcagagatgtttctaagtggaaggaaggggagctattagctgagagaagactgggtaagggcttgaggagcctagaaagttgaggatgaacctctaaaaaggctaccagtgggagcctctacaatgcaggtgacaaatgatctttgatcgtcttcctggttgtattgtggattgtgtaaagaagataaaatagctaatgcttactttagggaaacacaaaattctacacgaattccccaggcccaaatatataatgtgcaaagatttgggagaaatgcagttatttccccaagtaaatatgaggaagaaaacttaactgcctctctattttagccgtctggctttaattgtgctgtgtatgccaattgtctagaccctgtggtttagaaatccagcactcgggcagtatgatacactcggaagcctgtaagagagctccgatgagctgaaggcataaactgcaaattcctcttgtagctactaaatttaaactggatttaattgtctccactggatatatcttaggtccacaaattggtggatctgtctctatgaaagaaaacaagataacaataaaaaccaaaacaggacagtcctcattcatattccattgcattaagtccaaaagccttgaggttgaaaagatgaaaaagtacttattgttgttaaaatatgagggaatgttgaacaaaggtaagaaataaagaaaagcaattatttattaaaaaataagaaatcagtttaaaattctttgtttcagcctttgattcactagtacattttattaaaatgcacttatatttctctgtagacttgtagctatatgttccatatattctgctgaacttgagagtatgcattgtttttagatttggaatctaccccttctctaaaatgtatctgtattacacttacaggcatattacatttatatatatgtatacacacatatgtactgatcatacataccatgtaccaacaaaaggttaaattatgtggaatattattggtcgcctaaaagtgtaataaattttagaaaacattttcaaatggagttagaggcagagaaaattttctgtgcttatattacatctacttatgctggatatttatccctggccagagcataaatgtatttgaggggaaaggattacttagacatatgttcctgcctccatattgcttgtgtagatagtcttccttggaaggcctacccttcttcctcttggccaatctgaatactggcattcagatcatgactagaaagaaatgttagccatcccttgaagaatatcttttgtcctaccaacctcacaaagtctttcttcattttctgcagtccgcagtgacctctcctttctctgaacttttgtgtcacctaaaatgtatataactcatttgatagctttcataaatggtctttacttttttgttcatatatatcttatctctctatttcatattacatttcagggtagatgtaggtcttatacttctctgtgtcatcattgcacctagctcaatgccttttacataaaagtataatacttataggtgataagtataatcacttaaattattgcttaatttatttttctggtatatttctttggcacataggcaatactcaaatgcttgtttaaacttagtggatagtaggaactcaactatgtttcaaatattgtttaacaaaaatttagccaaatagttctgcattttaaagaagaatatttgatagtgttatagacaaacactttaaagaaatgccattgttgcctttgactgtatctgaaagtattgtttaatattcaagcactacagtaaaagtcttggaataatttccatttttttcctcttaaaattcaaagtagaatggtttttgcctttcatatgaagaaaacagcttaatatgtagttttaaaagtatggtactttttctgtaactaccccacattaagggcttagtttcatttcaaaagacttctttatgttgcttgaaactgtgcttttcaattagtgatgcacattagacatgtgagtgctaaatatttttgccaagcattgtcctgtatttttaacacttgctttttacatagtggccagcattggctgtggattggtttgaataaaaggagcccagatttacaaggatcctggcaatggagtgatcgtacaccagtaagttaaaacgttattgttttaggtagtatggaaacactgtttgtttcaataacaagttgattgttaaataatacattgacacctaaaatttatatggaaccacaaaagaccctgaatagccaaagaaatcttgagcaaaaagaataaagctggaggccatcacactacctgagcttgaagatacacctcaaagctatagtaaccaaaacagcatggtactggcataaaaacagacacttagaccaacggaacagaatagagaggccaaaaatacatccatatatttatagccaactggttttcaacaaagataccaagagcacacaatgagaaaaggacagtctcttctataaatgatagtaggaaaactggatttccacatgcagaaaaatgagattaaacccttatctcataccatatacaaaaatcaactccaaatgaattaaagccctaaatggtaggccccaaactatgaaactactaggagaaaacacagggggaaagctccatgacattggtctggacaaggatttttttggatacgaactcaaaaacacagacaacaaaaaccaaaatagacaaatgggattacatcagactaaaaagcttctgcacaataaaggaaacaatcaacagagtgaagagacaacccacagaataagagaaaatatttgcaaattatcatctgattaaaggttaatatccaaaatacagtcgtacatcacttaacaatgggatacattttgagaaatgcattgttagttaggcagtgtttttgtgcaaacatcatagaacatacttaaacaaatctagatggtacagcctacttcacacataggctacacatctaggctttatattgctcctaggctacaaacctgttgaacatgttactgtactgactactatagggatttgtaacacaatgataacatagaaaaggtacagtaaagatataatctcgtgggaacacatcttcaagggatggctaacatttctttctagccatgatctgaatgccagtattcacactggccaagaggaggaaggataggccttccaaggaagactatctacacaagcatatggaggcaggaacatacatgtaggccatctgtggttgactgaaaggccattatgcaatgcatgactgtagataaggaactcaaacaactcaatagcaagaaaacaatctgattttaaaatggccaaatgactgaatagacatttctcaaaagaagacatacagatggccaacagtcataggaaaaaatgctcaacatcactaatcatcagggaaatgcacattaaaaccatagtaagttatcacctcccacctctcagaatgattattataaaaaagacaaaagatacatgttggtaaggatgtggagaagagggagcttttgcacactgttggtgggaatgtaaattagtacaaccattattgaaaacactatgaaggtccctcaaaaaattaaaaatagaactaaccacatgaacagcaatcccactactgggcatatattcagaggaagtgaaatgagaatgtttaagatactcggagggtgactgcagcactattcatggtagccaagataggaaatcaacctaagtgtccatcaacagatgaatggatgaagcaagtatggtacatgtacacaatggagtactactcagccataaaagggaaggaaatcctgccgtttgtgacaacatgggtgaccctggaggacattatgttaaatgaaagaagccaggcacagaaagacaaatgccacgtgatatcactgagatgtggaatttaaaaaaaaaaaaaaaggatctcatagagctaaagaatagaatggtggtttccaagagctggggcagatgaggtgggggactggggagatgttggtcaaaggatacaaaatttcatttagataggaagaataagttcaagagatctattgtacaacaagttggttatagttaatattttatattcttgaaaaatgctaaaagtagatgttaagtgttctcaccacagaaataactgtgtgagataatgcatttgttaattagctaaatttagtcagtccacaatgtatatatacttcaaaacatcatgttgtatatgataaatgcatatacttttatctgccaatttaaaaaataaaataaatacattcacgtatcatacaaccattaaaattatgtgtctttattgaaatgaaaatagagtctcatataggcagtaaggaaaagacaagttacaagtcttctttttatttttaaaaacccatatgtatagtctctctatatatagtcaaaaaattgtaaagctataaatatagtagtcatctttgggtagtatgagtgatttttttctttttgaaatggggtcttactctgccacccagggtgaagtgcagtgctgcgatctcaactcactacaaccttcacctcccaggctcaagcgatcttcccacctagcctccccagtagctgagaccacagatgcatgccatcacgcccggctaattttttttttttttttttgagacgtagtctcactctgtcgcccaggctagagtgcagtcgtgcaatctctgctcactgcaagctccgcctcccgggttcacaccattctcctgcctcagcctcctgagtggctgggacttcaggcatgtgccaccacgcccaactaattttttagtagagatggggtttcaccatattggccagggtgatctctaactcctgaccctgtgatccacccgcctcagcctcccaaagtgctgggattacaggtgtgagctaccgtgcccttccacgcccagctaattcttatatttttttgtagagatagggtttcaccatgttgcccaggctggtctcaaactcctgagctcaggcagtctacccatcttagcctcccaaagtgttggaattacaggtgtgagccacatctggccacaagtgattgttttcaaagctttctctttatactgtttattttcatttttatagtaagaagcttttctttttattatctaaatatggaagagttatacaaaaaataaaatatctttttctggggggactaggtggggatgacagagtctcactgtgtcacccaggctagaatacagtggtgccagtatgactcactgcagcctcaacctcctgggttcaattgatcctcatgtctcagcctctcaagtacaggcacatgccaccacatccagctaatttttgtattttttgtagagatggggtttcaccatgttgcccaggctggtctcgaattcctgggctcaagccatctgccaaccttggcctcccaaagtgctgggattaccagcatgagtcactgtgcctggccaaaagtatccttattggaggaaattatttgtttggagaaacctctagaaaatccttgctattattccacatttatattataaggatatattagtgtaatagttataggagcaaaattattctcagatattcaatatttactccaatttttgtcaccaaaaattggtgactccaatgtcacctccttttttattctttctaaatgtaaaactccttgagtttattttcaaattggagcatatctgagattagttaatcaaataatgagcatttcaacacatgcaaaaaaagaaaaaagtattttgcaaacctgattctctatgactccagcggcgaacttaatacactattaacttccacttctgaaactgtggcttcctttgtttggaaacttatgacattatgacatttgctaagtcctctcatgatttagcatcatgatataaaaaagagatggaaaagttttctttctgtggcatatcaacgcacttgagtgattaaggctgcctaaattacatctaaattgcaaatatttatacatcagtcttaaattctcaagcctctcttgtcttttcaggtgtctactattatcatgccaaatgagtttcagcaggattatgacatcagagactgtgctgctgtcaaggtcagtacaatgctggaaaatctgcatatttaaaacataagtccatcatcatatgcagtcaagtaacagatccatggagtgtctttttatgtgaagcatgatgttagatgcagtgagagataagcacacccatggcctggccctcagcagcctaacttacacttcatttgagaggataaaattcatattcaagaaaacctctctcattaccacgcagtaatatgctccaaatgagggggctgaggaaggctaatgaaattcagaggagaaagtgagtcccatggccatttcccaggaagaggtgggacttgaactgggactttaaggatggatagagtttctacaaatgggatagggtaaggttttttcatgaggggatggtatgagaaagtggtataaaataaggtggaagtggaagagggcagtggagaacagaatacagatcaagaagtttcattggtgctgtccttgataacagtattaggaaatcagattgatgccactttaaggaatttctacacttcttgataggcaacagggcattttttaaagtttctgagtagggagggtcacatgaactaaggagggtatgaggaagattcatcttgagacagatgtcaaaagcaacaggtaagattggaaggcatagaagaccagtgaggcatcttcctttgcagaatgcattcatgtatccatttcataaacagtccaaggagtcagtgaggcactgggtgatagaacaatgacaaggtacaaagcatagccattgtcttcacaaaactaaagtctagtaggaaataaagacaagtaaacaagcaattacaacaccactgagtaaagactatgacatgcgaaatacaagttttatgcaagaacaagaatattatgaaagaataataaggatggtgatggtgatggtccatggtggtggtgatgatgatgatggagcagctaacactgattaactcctttatgagccagccactatactaggcatgtcacatatgtcacatagcacataagcaatcttgtgaggtaggcactgttactgtattcatctcacatggaaatttgagctgtgagtaatttaccccagcttacatggagtaaatttaaactgaaagaactgaaatttacacccatgtgtgtctgggtctggtactcttaaccactatgctatatgactaggcatttatagaaatagaaagggtattgatttatgagaaaattgtatgttttagttcagatattttgaatccaagctagctataagatgtatgctatggtaagttgagatcaagagtcttgagttgaaaggaaaatgtatatttttaaaaaaagggccaagaagtggatttggaggaactgccaatatatagagtgaaaaaagatgaagatggaggagacatcagttaatatctttgatttgtagtccaagaaagagattcaacaaggtggctgaccagaaatgttacaggaaggctgagggatataagaactgacaaaaccacaggaaagcactgttttcaaagtaactcttctagtaataaactgtgtagtacatgtcatttttatagaattcccaatgtaacacaggaaaaggtgaaaacttcagagaagcttatggaatttttagtagtgttgagaacactggtacaataaactgtgttctagggaaatagagttgccaagtatggagagatttgaaaatctaccaaataaataaagagatactaatgcaacctgcatcaggaacaagcccagccagggcagtgttctgtaaggaaaatcttacctcacctgccacagaacccccagaaacttggtcttaagagaaaatagtctaagaagtgatggatgtctctcccaagtaatgccttcccctatcctttttatcctacttgctgactggaatttgtaatgagccatcctggaccatgtggagaagggcaaaatcctagaaatggcatggtaacaccagagaaggagcctgagccactgaggctggacctttatgtcgctttctgatctaatttgatcacagcttggtgcttggatacctctgaaataaatattctaacaaaaattgtcaggtgtgggggagaaaatttgcattttggacataaacatgactttacaacatatttcctttgttagcccctttgagggctcttgctcagggtattactgtttaaatattccattaattcatgtgttcatttatcgaacaaatatcttaggtgctagagctaaaatagagatcaaagtcatagggcttacagtttagtgttccataagggatgtatcaacttcaaaatattctgcaatacttttcctcttataggtatttcataggccatggcgaagaggctggcatttctatgatgatagagaatttatttatttgaggccttttgcttgtgatacaaaacttgaatgggtgtgccaaattccaaaaggtaagtggtagttattccttttcacaaccttctcatgttaacattgtgaatgcctagctcaaagtagctaggggagcattttgatctataattctgatgtctaaaagcctatgatgatgatgcaattaatatgtggagcaccccctgcctgactccggcttctaatagaaggctagcttattgaaatttagtgatatcttactctttgatcatggaagaatttgcatagaagataaaatgtgaggctcattcagggagattagattttggatgaaatattattttaagcaaaaggagaaatgcagaatcattttcgtttttattttgatgcaaaatgaaaaaataaagataatcttgggaagaataaggcagaagtcaagaaataaaaatttggcaggtccctgtaaaatttagaagcaattttcaatgaactataaaactgctaatactttatataaattcaaatttgagaagccagttagattgatagtatagcctttgataacagaagggagagtggggagaaatgtagataccattttactttactttttccaggaaaacatgaaatattaagaaaaatgttaagactttaattctcaaattattattattattttttaagacagtcttgctcagtcttccaggctggagtgcagtagcacaatcttggctcactgcagcctctgcctcccaggttcaagtgattctcctgcctcagccactggcgtagctgggactacaggcacccactaccgcacctagccaatttttgtattttcagtagagtcagggtttcaccatgttggccaagctggtctcgaactcctgacctcaggtgattggcccgcctcagcctcccaaagtgctagaattacaggcatgagccactgcacccagcctcaaattatttttaagcagagattggctgtatgaaattaattagcagaaaacccatagaaggtttttaaagaaatctctgaactgaatgtaaacagatcattgaaactaaaggtatatcctcctacaagttctcaaagaacccaaagttcacatcatggaactgcctattagaagattgttattcctaaaatagttaaaagagcttcagatgtgacatcaggtagtagcaaatctctttcacaaaggcaaactgtcaaaccagttgtaagggaaagacagttgtgttgatgggtttttctaaaggataaattatgcctaagttattcttgattattttattaaacccaaaaaagggacaaaggaaaaccagtttggatatcctttaaacaagtggaaaagtaacttgtatataattaattcggacaatgtctctgttttgaagtgttaatgtgagcctcccattactctctggcatttgttagcattccacagacagtgtcattgttccaaccaaagtgccctcgatgggagctgctgcccccacctcctgtttgagcagtggagcagaccccagagtttaaacaagggcaaccttagaaatggcaaattagccaccagaggaaatagtatgaagggcatgtggaggtgtatatatattttttttaatatatattttttaacaagagagaaaggaattaacccacttaaaaatataaatcaattaatcgaacaaatctaaataattccacctccattatccccatgcagaaataaaataaaaaactaaactcctgttctcagcctgtcccaatcacttgaagaaatcaatgattgcttgctccagggtttaaatgttatgttcacccttttttgaccgtactgtacctaactttctaagttacgatgtgatgcattcagctggttggatattttcttggttattagagcagcctaagtttactcaacttgtattcatctgtattttctggttttcttaaagaagttttcctcttatgtattctaaatcaccatgcctcttctctggctcttgcctttttattacttggttctaattaatcctctcttccctaaaagagatattttgacaacctgtaaatttgaagttacctcaaccacagtggatatttgtactttttaaatattattttttgagaaaactgtgtcaaaaataaggctcataaaagtgtttttaggaaaattacctatgatgccattacccagacatagcaatttttattgtatttcttgataccttgtacacacatacatgtttgcaatcttgtataaaaaacaccttgcatcctacttttctcactaatttaaagatatttaaaggttagccatagctttccctcccccacacacaaataatcagaagtctttgacaagattacagacaagaaactatgtacattttgaactgacttgcaacattattgttggaaattatccaatacgaatagaactggctcagagagagactaaagatgctggctattcaggcagtcctctgagtcaggtcttctgatgcctgcctgaggctcacatgccacaccaaaattaagaccagctattttactctgtaatttctaagattaagcaaatgatgtctttgacttgaagccagtgtgatctgtggccagaatgaaaagggggaggaacgcaaataggctcccatggggaacttccctgtgcctggtcctgtgctggccacttcctccagggcatcacacgtgaccttcactctctgtgagtcaggtagccatctagttttcatagaggagaaaatcaaggctcagagagggttaagccactcatccgaaataccatggcagcaaaatgcataagggcatttgcacactgacccgcccagcttccaacccggaattctgtgtagcatgccattatttactccgtttccatctgggaatcctgagtcacttttaattattttcctctcagttttgtctcatcttctcaaaaggttcaacactggagcattgtacattgtttccaaggatatcttggaagacaatgaactctatcaacctaagtttacagaacagttaacctgtttcattagatgcagaagtggttcctgaataacttcccttttcaatgaccgttattttggttcctacttcttatgcttctgtgtaacacatacaatatcattatttacttgtttttactttctaattcttagctatattttatctgtcttacttcttttgtgacctctgtgacacaaggtaaaagactgctagaaatacttcattaatatttaacgtatctgccttttggatttctcctgaagcaggtttagcatcggccctacaaaatacaactaaagtgatcaaaacgtgaagtgggttggccagaaatggacaagactcaacaatactgcaagtcctttcgagctacattaaaggccgtacttatagtataccctgatctgtcatggaatactaatgccacttgctttcttcctcatacaggccgtactccaaaaacaccagactggtacaatccaggtgagttaagaaaactgaaatttaaccaaagctgcttttaccttgtcactaatgcatttagttaattatttaagtgccagcttcttctctatacatcttcaagtgagacaaaatttctccaggcaaggaaggtgagcgactggtatgggatgaggtgatgagggtgactttttccttccctgtgagtgtaggggagtggcagagtcactggctcaggaatctcttgttccttgtagtcagtactgccccagccagagagggccggtaatctgaattactatttatagttttgaacattaactcatgcttagaggacacagtttgctttgcatagtcataattctaatctttttcttcttcttctttagaccgtgctggaattcatggacctccacttataattgaaggaagtgaatattggtttgttgctgatcttcacctaaactatgaagaagccgtcctgtactgtgccagcaatcacagctttcttgcaactataacatcttttgtgggactaaaagccatcaaaaacaaaatagcaaatgtaatttaaaagaatatattttaaatatatttcttatttttgtatttattccatttaaaaatattacaaaaattttgccaaaatctacaaaagttaaatttttctttaatgtaaaatctgcctcacagcatccaaatttgtttcatgttagaaaaattaagtagaattgcttatgttttaaaatatacaagattaataataaatgtcactttataaggtaaacatcagtagataatatagatcattctaatttcctgtcacattttttactaaaagtcaactttatagttaacttgagtttctgtttctactaataagtaactttgcaaaataatttttgggaagaaaaataatttctgtatttttaaatttataatcaattgcaataggatactgtatgcccacttaaagtattagtctaattaatatatgcccataattacagctaccatatttcctgtacccacaataggatctgtaaatatactgagaaatttcaactactctttggcaaaaggttctagtttgtataattttgaaatctaagtaaggaatgtctggaaattttagtggttagtgattatagtaagacaatgtattcgaatcaaaaccctcaagaaagctcagcacatataaggatggatgtttggcttgtttttcagatatctggtgatggacagaagtggtggataagaattagcgagtggccaatagatgatcattttacatagtaggtgacatcattgattctacctttgtaaagttatcacttaaaagaagcagttccttttactaaatggatttctatttataagtagtttgaatattaatccataaactgcctaaattagagaaaccaagcccttttgcatgttagcatcaagaaaaaaggggtatagagtaatggtattaacattaaatttagaaataaaataacttacagtaaaaagaaaaaaatggaacacctaattacattacgagttgtcaaatctgtcattttcttttagctcacgatatccatggcaccgctttcctgtgacatttggagaggaatgcttgtacatgtctgccaagacttggcttatcggtaaagttaattctaaatcctttaatgctgattatgtaatatgtgaagttcaggttcagtttctagcttaatcttgttttccttttaattatatgtttggtaatttcatcttattctgatttattattagcaacaatagctcaaattcccaatgcaaataaaggtacttttcactgtgaatattttaacttcctttatcctaaagcagttacttagtaataaacttaccactttcctaactgataagtgtctaagcaaattttcaaagataagcaggcagcagttctaaaatatagtttaagtcccctccccctgattacattgccccttcaactctcttcctacctcctgccttcaccctgggatggtatggtagtcacacaaaatgtgtgctgtttcatagacagtattggtatgctgtaacctactgataaaaataatcatagaagacagaaatggctagagaagaaagggaatatattttaagcatttaggaaagattgatttcaagagcctttctttactactgggttgcttttaaaatgtgctgacttggccgggcacggtggctcatgcctgtaatcccagcactttgggaggctgaggcaggcaaatcacttgaggcaaggagttcgagaccagcctggccaacgtggtgaatccctgtctctactaaaaatacaaaaattagccaggtgtggcagcatgcacctgcaatcccagcttcttgggaggctgaagtatgagaatcacttgaatctgggaggtggaggatgcagtaagccaacattgcaccactgcactccagccccgggcaacagagcgagactctgtctcaaaaaaaaaaaaacaaaaaaaaacacacaaaacaaaataaaaatgtactgactgaaaaattctcaccatagtaatcctggcttttcatttctcagacttaggtaaaccaacagactgtagtaccaagttgcccttcatctgtgaaaaatataatgtttcttcgttagagaaatacagcccagattctgcagctaaagtgcaatgttctgagcaatggattccttttcagaataaggtaaaaagagaattgctacattatgcaacaatgattgcttccatgctggttttatagcctatggcagaatggcaacccattagtgacaacatcactgaaatagactctgcatgtttcaggatcccacctggccctctgtgttgccagaaaccgtggatgatatcaagaattaactctcaagttggtcatgcctacaggtcttttaaagtgcagcatttctattttgttgctactaacacttaaattgcttaagttgatctgttgagggattgggatgcattgaatagtcaggactgtctctatggccttataggaaactgacttaatttctggcttgtgttttctttttcccctcaaggagagcatccaagcagcatctgccaatcaaattagaccagcatttcacaaactactttttggggactacacacatgctacaaaatgttaatcattgatcttgcctccaaatgggggttttatgattaaataggtttgagaaatgctgcattctgtatctgcctctttgagatgcataatccatgttggtatatgtatgtattaggaaatgcatttggcttctgaaaagaggttgctacagtatgagaaaagatttattctgtcacattaaagacatttgaagataagcaggtttgtgtggaaacaccatgaagtcttcaaaatcaggcttcttttggttttgctctgccatccttaatataaggcttccgagcttaaattcagggtgttctctctagggtcttttctagaagttacccgatgagtttgtccacattgggtagcttggctcattggccactccagtctataagaaagctgaaaaaaaaattttttttgtaagatatttcaaggaacacaatttgggacataccactctacactaaagtgatcataatgtgaaaaagggaaaaaagagatgtgtctgacagctgaaagcatctgtagtaaagctaggggtacattttaactttttaaaattaggacaatctttttaattcctcaaggtaatagtactgtgttaatttgcatagctgatataaatttgaattaaaatatcctgccaagaaagagatgaatttttcaacagtgtttcttgacataaggagatgatgattaaggacacagattttgaaattaggtggaacagagtacagatactgaccttactattgtgtggctatttcacttatggatgaagttatttaatgtccctgtgcctcagtttctgtctccattgtgagaattaaatgagataatactacacaaactgcttaacacataggaagcactcaataaatgagagatctttaaatatataaagatataatataaaatatatattaaagatataatatacaatatatatcttatatataagatataatatatatatatatatatatatatatgaaagtttgaagaccgctcttcagttgtttcaattgagaaggtagcttgagcctggaagctcaaggttacagtgagctatgattgcaccactgcactccggcctgtgcaacagagagagactctgtctcttaaaaaattaaataattaatgagagcataaacttgaattcttatggtactacattgcaaattaccatatctcacagaccgaaaattagcagccctctaaaagatgaagcattttacttcctatgtgagcgttcctgtgtctggaatctcatgcttcacatatgtctttgtttgcagtgttttctaaagatcaaacccgtgtctctcacattttctcaagcaagcgatacctgtcactcctatggtggcacccttccttcagtgttgagccagattgaacaaggtactggaattatttgggaaacatgttttattctgatctggggccaggttagttttaggaggctatggggaattaacatacaaaaattcttattaaacttcttttgttatggaacagataaaagactatgttgatagataaacaaaatatattcattgacatttttaatgtatctttaatttgaataaatcaaatgctttttaaaaatctctttctaacagactttattacatccttgcttccggatatggaagctactttatggattggtttgcgctggactgcctatgaaaagataaacaaatggacagataacagagagctgacgtacagtaactttcacccattattggttagtgggaggctgagaataccagaaaatgtaagtttttttaaaaaccaatactcttcatacctctgtgaaatacttgagtctttcatacatttttggactaagcaaaaccccactgtattattccatttgtatgaaatgtccagaataggcacatctaagatagtaagtaggttagtgattgctagaggctacgggggatggaaggattgagaatagtgcctaaagagtatggagtttcttttggggatggcgaaaatgttctaagatttatggggtgatggttgtgtaactctgtgaatatactaaaaactattgaatatgtactttaaatgagcgaattgtctcatatatgaattatagctcagtaaagctgttgcaagaacaacaggtgcctccccagccttctgatggatgtactggtttttcacagtagcatcagattccatagcacttatttcataaccatataaaaccatcatgtagtgagttgtaaatagaagcaaatacagatgttttgctttacattttgggactttgggctctcagcctcagtctcctgaggcaaaaagtacaaaattggtaactggtgatcatttttccccaagagctaaatatagggaagtcagagaagggaagagggcattatactgacagtagttatgctgacaccacagtattaccgcccactgcttctgttctctatactttctggatgcagattaccttttgcacaaagggcaaagattgagaaattaacataaaagtctaattccaaaagtatgtcttagacagtaatcaactgatattcctgacataatgttactttgctcaaagttgatgttggtagcaaaggaagttctcaatcgtgagtaactatgtacaatataaatatcaaattattacttggttattatagaagatgtggaagttagagtaaacgcagcaatgaaaaatgtcaaccctaatcttaagacagtttaaacttttaagcataatctatagtaagaaatacatttaaatcaccatctagtatatagatatagatataatattaattgaaacaaaagtttcaagaaacaatacttacccttataatttatgcactctgatatgttcgttctcttctattttgttccattctcctgtcttatcctatcctttactgtccaatcctactatctcctattctgttctatttcattatcacaaatacttgccaaaatccacttaagtgatttcatgatatacgaaatgagtctcaaccatatttgagccctagactagggaattacaatgagtacttgagcatcttttcttctagggcttttccatacactgttttcttgatataagtgagatcatagtatatatactattactctgcttttctcagtttgtattatatcataagtagtttcttcagccattaaaagatctacttgataagctttttaatggttgctggggaacaggtggtgtttggttacacgagtaaagtctttaatggtgatttgtgagattttggtgcacccatcacctgagcagtatacactgcactcaatttgtagtattttatccctcacccccttcccatcctttcctcctaagtcccccaaagttcattgtgtcattcttatgcctttgcatcctcatagcttagctcccacttattagtgagaacataacgatgtttggttttccattactgagttacttcacttagaataatagtctccaatctcatccaggttgctgtgaatgccattaattcattcctttttatggctgagtagtattcctccatcatatatatatacatacatacatatatatacatatacacacacacacacaccatatataaatacacaccatatatataccgtatatatggtgtgtgtatgtgtgtgtgtatatatatatatatatatatatatacacaccataatttctttatccattcattgactgatgggcatttgggttggttccacatttttataattgcgaattggattgcacaatatttcttgattgatatgccatcatttacctaaccagtgctgggtgttaggttgtttccagttttacacaatcataaatagtgctgcaatgaacacctttgtgtataatcttagcctatatttcacattacctgcagagagattttggaagtcatgtagccagatcaaaggatataggtaatataaagctctgattaccaacttgcttccagaaaggtttatgaatttacattcctattcacagcatattgtgattgtccttctatcctcaccagcatattattaatttccaacatatatcaagcagttaagatgtgccaggcactctgctaatgtatcacatacattatttcatttaatttgcccaatagctatgaaataaagatgttacccctgccccaccttagaaaagtgaagatggagtcagtaacttgccagagatcatgcagcctatgcatgcagagtcacggttgacatctggttctgggtgggcatggtggctcacgcctgtaatcccagagactctggaggctgagagggggaggcctgcttaagccctggggttcaagtctgtagtgagccatgattgcaacactgccctcccatgtgggcaacagagcaagaccctgtctctaaaaaaaattgttttaattaaaaaatgagaaaaaaggctgggcgtggtggctcatgcctgtaatcctagcactttaggaggccaaggtgggcggattgcctgagctcaggagttcgagaccagcctgggcaacacagtgaaaccccgtctctactaagaagtacaaaaaattaaccgggcatggcagtgtgggcctgtactcccagctattcaggaggctgaggcaggagaatggcttgaacctgggaggcggaagttgcagtgagctgagatcgtgtcattgcactccagcctgggcgacagagcgagattccatctccaaaaataatataaaataaaagagagagaaaataaaattgcctttaaagagcacttggtttttaaaattcttcttaatttggtagtttgatatcgtattttcattgatctttctctgatttctaatgaaaacaaacttcaataagttaaataatcattcgtagttcatcaagtgggagtgttctttttctttgcaaatttatctatcaaacccttcatgtatttcttattgattttatgactttggaaatatcaaatatgctgatcctgtatttcttgtgtttattgcaaatactttcctaagttttctttaagtctgaatgccaaaaatattacagaaataaattttgactattttttaatatgttcaaatctgtatatttcctttttatttttcctctgttgcttttaggttagaaagtccatcatgtaaattgtaaatattagttaaatatatgtccatattttcttctagttttgtttcataggttgcctttttttgttgttttttctgacacagggtcttactctgtcacccaggctggagtgtggtggtgcattcataacttactataacctgacctcaagcaatccgcctgcctgagccttccaagtagctaggactgcaggagcgcaccaccatgcgcagctacattttctaatttttttgtagagacagggtctcattgtgttgcccaggctggtctggaacccctggcttcaagtgatcctcccacatggtccttccaaagtgctgggattacaagcaggagtcaccacacccagcctctgttttttgtgtgttttttttttcccctttctgatagcatgttacatccatggtatatgatacatgttgtcagtgcatgcttaattattttccctaatcctagccacttgttctagcatcatttattacatatactttcatttgttaaaaacaatataggcctgggctagcactttgggaggctgaggcaggaggatcacttgagcccaggaatttgagaccagagaccagcctgggcaacacagcaaaaccctgtctatgtttaaaaaaaaaagagagagaaaacaatatagcaatataggatgcctcttttatcatatattaggactgtgtgtgtatgcatatatatgtgtatgtgtatatatatatactgtattttataatatttatatcagtatggtagctatttaaaaatatttctcatatacataatgtgtgtatgtgtgtatataacatacaaatacagtcagcccttcatatccatgggttctgaatctggattcgaccaactgcaggtggcaaatatttgagaaaaaaaattttttaacctacatcctcctgtatacttaaatcatctctagattacctataatagctaatacaatgtaaatgctatgtaaatagttgttatactgtattttttagggaataatgacaaaaaagtctacatgttcagtacagacaaaaaaaattttttctcaaatattttccatctgcagttggttgaatccagattcagaacccacggatatgaagggctgactgtattgatatgttatatacacacatacacatattatatatatgagaaatatttttaaatagctaccatactgatctaaatattataattttaccatatttttaaaaactataataggattaattatactttattacatgcccttaaaacatacttttagatattcttgtccatttttccaggaaaactttagaattattagtcatttttcatccaaatagttaaaattttaaaactcttgatgagaatttgactacatgtttgggagaattgacatctttctattaatcttccaattcatgaatttgatatatctatttattcaactcttcctttagatcactctgtgaagttttatagttccatctctttctcattgtcattaacaatggcaactttagctataaaaagaatggaatcatgtcctttggagcaacatggatggagctggaggccataatcctaagcaaattaacacaggaacccaaaaccaaatactgcatgttctaacgtacaagtggaggttaaacactgagcacaggggagagggagggagggggacctgggttgaaaaactacctcctgggtactgtgctcactacctgggtccaacacacccatttaacaatcctacacatgtgcccccatatctaaaataaaagctgaaatttaaaaaaaaaaaaaaaaagaatgacagctttaaaaaatttttcttactgatttgtggggaagctattgtttgaatttgttatgggtttttttttcccccataggcatctgtctcactaaaagctctttctctctgagtttttcattagattttcttgggtttcctaagtagctaataataatatacaagcaacagtgaccctcgttcctatagttacctctctcgttttcatttcatgcctcaccacatatgctagaatttccagaatttccatggcaaataccaggagcagtagtagccaccattgtagacttgatctggacctcaacaggttgttaaacattatgttgactcttggtttaagatatagcattctataactagcttgtttagaacttttaatcaggaataagtactgggttttctaaaacttgttcccagcatctgttaagattgccatatagttttttttttttttttttttaccattaggcctatttgtacgtggtatatattagtagatattgtattaaaccattttacattcttgttgtaaaatctgggtgctcagagtggattaatattttactattctgcattatatttgttagaattttacttgggaatgtgttcctctctcttcatagagtcaatttcttatgctatattgtcatatttttttctgatcatgttagcctcataaaatgactgggtagctttccatcttttctgtgttctgaaattctgactcagcttggggaattctctttccctgaaagtttgggggaactacctacaaaatgttagaacccttatccaggagcatttttgctttttaaaaaattttaattattccttatttataattgactcataataattgtaccaatttatcaggtgcagtgtgatgtttcaatgcatgcatgtgttgtataaacaatctgatcagggtaattaccatattcctcactttaaacatttatcttttctttgtaaagataacattcaaaaccttctcttctatgtgtcttgaaatatacactacattgttctttgcagagatcatactctaatgataaaggaatttggtgcagcagtgaagggcccaagctctggagtcagattgcctaggtttgaattccagttcagccatttactatgcctttggaggtttacttaacttttcttaagcctcaatttcttatctgcaagctctaattctgttgcattaccttataaggtcaatataaggattatataagataatttatttaaagctttatcaatagtacctgacagacagtaaaaaaaaaaaaatggccattattaattttccatttccttcaaagtgattgttacattttggtatttccatttttcgttatgacaattatgctaattggcatttttcaagaaagttgtctatttaatttagattttcaaatgtattgaagtaaagttgcttatggtatttaaaaaatctccattatctttgctaacatttttagtttgcattatttacatttttacaaaaacagatgcatgttattggttttgtccactctcttctccaccctctactcctattgcttgacctgtgttataaatactatttctacctttttctaccccatttttcgtggggttctgtttttgttcattttccaatctcctatattgaattcagttcatatttcctttaaaaaaaagagaatatatttaataatacacatttggctccacataaagttttactcataccaatttttttgacatttctcattttattctttcctataattattttagttcatttttggtttactatttattgagtagcatttttttttgtcagtatctcctggtataaacttacttttcttatttttctaagtgtgatatgtttcaaacatacagaaaatgatagggataatatacttggaataaattttcatatctaatattattgattgtgattagaaaatgaaatctagatacttctgttttaatatatggagatttttatagtgactagtataggatcagagctttaaggtatattctgttatgtggtacacaacttgttacaaaaagtctataaaaatctaataagttgaattaataatcattatgttttgcttatactgtagtcgagtgttaaatattgctggaggtgttttatcttatttctaatagtttatctctttaaaaatatgtttatcaagattgccactattttgttttttataaagttaattgccctttatccatgctttgaaagtttttaaagattttctaggaaatgtcatggtcaggtccttcatggaattcttttatagggggacaaattcaatctagaatctaaacttttcttgctaggagcttcagaccattgttacatgattgcatgtatgtatttgcctttttgtttagttttttgaggaagagtctcgctaccactgtgccctaatactcaacctccaaaaatcaccgtttactgggacgtggaattttacatcctgcagtgaacgccactttgtgtctctctgtcagaaatattcaggtaacaattattatctagataactatggtactttatgctattacatatatatatatagagagagagagagtcactttctatagggagggaggggaacataggttgaaaaattacctattgggtagtatgcttaccacctgggtccaatacaccatgtaacaatcctacacatgtaccccctgtatctaaaataaaagccgaaaaaattttttaatactataaaagaatttatattaatttataatcatatggcttaaaatttcagcatggctaaatccatattgggttagtgagtcagagtttatcaaatggaatgtgatttttttaaaggatcattgccataattaattaaattaattaattgtatctgatggaatttgttaatagtagttatcccattatagtaattgaattttgttcttttttctactctggcatttttcagattttacattttattatgggaaaaggagaaaaaaacttcatatttttaattgagtgcagtattgagtattaagtccactaatagtattcactgttaaatttagcattaacaaataaacaagtgggggtttgaaacattataaacagatcactgtctatgcctttccataatccaaataaaagtagaatgcatacttaaaagtaggcatcatccatattttgaaaaatatatttttaaaaaagtattacattatttttcattgatcacaatgtgtttttaacaaatgatcaagaaaaaattttgtcatataatgagaactgtaagtagatatctcatgtgctttggcagaatttttttttgctaaattaatctttacccattttttccatgtttttaactaactcctttattagcgaagtactataaagcaataattcaaatacctcctcttgtggatggtttcttacatttcttcatgctagctctcccaggtgaaaactttgtaaggggatacttaatacatttatttccttcaaacaaaagaggtatttagcaccgacatgacatgataatgcaggttacatttatttgcagatattctcttcataaatcagaaaaatgaaacagaatgttgttctgattttagaaaacaaatgttgcagctcacacattttccttaaggtatacagcaagacatacctaattctctcacccaaaatctaaaataaataggcaaataatatctaaattagattagtatggggagaaatgtgaaaaaaatgtcccataacttgcagagtgtggggaagggtttgttgttgttgttgttttcttttacatgcagaagttaaaagcagacagacgttgcagaatgcttcagaaactgtaaagtatctaaataatctgtacaaaataatcccaaagactctgacttggcacagtgctaaaagggagtgtctgaaaagtaacatgcagctggtgagcatcacggacccttaccagcaggcattcctcagtgtgcaggcgctccttcacaactcttccttatggatcggactcttcagtcaagatgtaagtgttcagtcccaactgccaggactgggtgatggaaagcgacattttttattgtgcatagcttctctcacagcagactaaaacaaacagaagaactgaaaatcttactccagtaaatttcatggaatatgtcggggtttttaaattttgttttgagacaaaggctcacactgtcacccaggctggagtacagtggtgtgatcacacttcactgcagccttgacctcccgggctcaagcgatcctcccacctcagcctcttgagtatctgggactgcagttacacaccaccatacctggctaatttttgtattttttgtaaagatgaggttttgccatattgcccaagctggtctcaaatgcctagactcaagcactctgcccaccttggcctcccaaaggtgctgggattaccagcatgagccatggcacctagcagcaatatgtggtttttagaggcaattatctttccactattgaaagatctagtacttcattgtttaaatgaggaaaaggttctggtggagatatatatatatttgagcacttctttttatttattctaatcaaagacgagctagaatctggagctgccatatctcttcagccaatgaaaagataagggaagaatttaaaaatcagttgtgtggaagcactatggatagtgttaaagagtcctttccatccctttctcttttttctttttcttttttttttttttgagacaggttcttgttctgtcacccaggctggagtacagtggtgcaatctcggctcactgcaacctccacctccaaggttcaagtgattctcatgcttcagcctcctcagtagctgggattacaggcatgcgccaacacgcccagctaatttttgtatttgtaatagagatggggtttcaccatgttggcaaggctggtcttgaactctttacctcaagtgatccgcccgccccaggctcccaaagtgttgggattagaggtgtgagccaccacgaccagcttccatccctttcaacatcagcagcatggctgggcaccgtggtgcacacccgtagtcccatttactctggaggcaagaggataacttgagcccaggagttcaaatccagcctggactacatagcaaaaccccagtctctagtttaagaagaaaaaattcagcaaagtaaaattaagcaactctgaaaaggaggttgaatagtgttttcctccatctcaagtgctgatcctagatagatgtctcaagcacttctcattcatttcagagcccaacaaagaatgctagtctcctactaattcgcatcactaacctctgcacatgtagcacaaaccggaatcattacacagctgaagttttggctataattaaataagggatttttaaataaagctgtggtattcctattggcattataggccacctcttttctcagccatggtatatcccaaagtataccaggatgggtctagggatgcatggaaaaaatgcgattgaagactcagaattgaactgaagaatggatggaaaaacaagaattgttatcaaaagctcaattaaaagtagcatttaggaatagcttaaagaatagtctctctgagccacagggtattctaaagttaacccagatcggccgggcatggtggctcatgcctgtaatcccagcactttgggaggccaaagtgggtggatcacttgaggtcaggagtttgggaccagcctggccaacatggtgaaaccctgtctctactaaaaatacaaaaattagctgggtatcatggcgggcgtctgtaaccccagctactcagaaggctgaggcaccagaatcacttgaacctgggaggtggaggttgcagtgagccgagattataccactgcattccagcctgggcgacagagtgagactccatctctaaataaaaaaattaattaattaattaaattaaattaacccagagcaagccaggagatggggaagctgcttactcagtcctcacagtctcaattgttttatagcattgcatttacttgctttatcttcagcattggaaattctgtgaaacgctttgttgtgtctgttgtgaggaaacaataggtgattacatttcctagtttcagtcaccctaaatcttttgagacaaaaacagtattgcaatgtagaaaatttgtcagtaattaaaagaacaaaattaaagtcacctgtaatgccagtacctaaaaataaacatgattcaatcaatattttggtatggatctttcaagttatttttctatgtgtacctatttattttttagacagttggaatcagactattttgtaactcccctccccacttaatgatttgggtcttacttcttatcctattttcaacctttacctatggttctcttttccctttcacccttaattttaacatattctgtgtagctgtttaactatatatcctaatagctgccttaattctttgaaaatgacaggatgttaataaatactttacattgaaagcaatgagaagatattgaaagattttaaacagagtagtggcaatataagactttacttaagtagacgacactgtgtggaaggccggggaggacgcaagcagctggagagagggagagcagttatttttctataaattcatgcaggaaatgctgttggcgtttacagtgtctgaggagaggcagctctgggttatgtgaagtgcagagtgtggccatgcagtgggtcactcaagtacccagcttgaagaaataaaaatacatagaattaaaggaagtcaagaaggcttggaaacatgaacacaggcatcccaagttaatggtaggaccgggaggacagcaagaattgggacatcttagtgaatgtcagggaggagcaaggcgaccaagtcctcagtgaatgtcatggggagtttgcagtgatacaaggggaataatcctgaaaggaaataaaaggagataaaaatatccactactcctttctcatagtcctgtggtatctgagaatagaatatcaaatagtcttcccctgtgggtgctgaaaggagattattcccttggaaaagccagatttatgtatttatttaagattcagggggtacacatgcaggattgttacaatacatacactgtgggatgctgaggcttgggcttcagttgaacctgtcacccaaatagtgaacacagtacccaataggtagtgtttcaacccttgctccactccctccccacttttggagtccccagacaatatcatgcccatctttacatccatgtgtacccaatatttagctcccacttatataagtgagaacatgtggtatttggtcttctgttcctgcattaatttacttaggataatgtcctccagctacatccatgttgctgtaaaggagatgatttcgttcttttttatggctgcacagtatgccatcatgtatatgtgctacatcttcttgatccaatccactgctgatggacatctagattgattccctgtctttgctgttgtgaatagtgctacaataaacatatgagcgcaggtgtattttggtagaacgatttgttttcctctgggtatatacccagtaatgggattgctgggttgaatggtaattctatttttgttttttgggaaatctccaaactactttccgcaggggctgaactaatttataatcccaccaacaatgtgtgagcattccctggaaaagccagagttaaattaagatcaattaagatcaagaatttagtgaaaagatatttatagtcttcatactttgtattcagtaaaaagataaaaggtgtgggatgatttatttagatggaatggaaattccaaaggatcagggacagggttaggtggggagtgcagcaaaggggaagaaatgcagggcagtctgaatgagtgcaggcaaagtcgcatggccgaagggccacactggaggccacagtggcttaggccctaactgggttaggttaggggctaggattacagctggaactctggtcatgaacatttcagaatgaagcagcgagtggtgttgaggcttgactgtgttgctgtttatggtttactaaggagactgtgtcgcttcgttccatatttcaaataaactagtgatgcagattgtcttgggactcaggaaagcttagctcagtgggtctgttaggccagcaccaggcccaccagtgggtatgtaaggtctctggcagcaccatggggaagctcagacaggcctgtaccccacaatccatctcctgtacctagatgggtggtcaggaccttggcagggtgtaaaggcagacgttcacagacctctagcacacaacagaatctagtgaatgaagaagcttctctccccaacaagtgtgaaaacagtgatgtgagagccacagcgcctgaagagttcagaggaagggaaccaccagctctctgtgtgccagctagcccctgggttgcgggctttacacatgttatcccattaattccagccccacgaagttaagtgtcacacttaacttggtaggggatggaaatttggagagatggcacatgaaagctagtaagtgactgaatcaggattcaaaaccatgtaggtttagctccgtagcccatattctttccactatgccaggtggtctctgatctaatcagtacttatagtgatcctcaccccattttagctttctgatttctgataaccagtggatccaattatgtgtgaggcagcgtagcataatggttaggacatagactctggggatcgacagcctggcagaaaggcccagcactgtggtttgtattctgtgggactttgcacaagttacatacctttagtttcctcatctttaaaatggagataataatagtacctctcctatatggttgttacaaggattaagtaagccaatatttgtaaagcatttagaacaatgcttgttatgtagtaaatggtatgtaaatgtgtattaaatattaaaaaaattaaaaatcattagattgaccatgggagtcaaaataatacaaagggttaacatcaatattgccacctgaaatgtacttctgctccttacaggatgaactcaactttggttggtcagatgggaaacgtcttcattttagtcgctgggctgaaactaatgggcaactcgaagactgtgtagtattagacactgatggattctggaaaacagttgattgcaatgacaatcaaccaggtgctatttgctactattcaggaagtatgtgaatttcagatcttttaattcttaaattattaacagtcccataagtggtagaatttctgaggagtggttttataaaatctggttttggaattgtgaagaaattatagtcatgtctttttatggcaacatttgttgtgaaaatttgtattcaagtagaattatatattacatatattattattaatgggtcattttaggcatgttttatttttatgtcagctgacaatggggattaacacttaaaatcccattgttactctacctctttctgcatatatttatagttgtagaaagcttacatttgtgagaattcttttgtgattcataatatcacaactaacaggacttttatgagtcttaagattcacagcaaccacctcaagctagcttaagacaaggggaaatttaggatccccaaaacggggatagagctgaacctataactggagatgagttgacaatttctaaatttcactttgtaaatccctagagaacatctcatgaacttagcctgagtcaggtgtgcagtctctagcccagtcagaggaaagtgtttttacaactggcaaggtcacatttgtgggtctgtggtagaaagaagacactgcttcatggacaaagggacttattgtgatccaggagagatactgagtgatctctgccacatattaaatcagtttaatgtatttgagtggaatatgtttatatttgtatctttgtgaatgtatggccttttcataaaatggaaaaagatcataatcagatactgtagatgtcagattttaaatattatttttgtttgacttggttaaagcaataacttatttagaacatcaatgtttcatttaaatgttcctttaaaattaatagtatcagtagacagaaactttaaaataaattctcagagttatagttaggtgacttttaataatgaatatgtttgtacagcatctctaggggtggtcccttgtacttgacatttggtaatgcaggaagacagaaactgcatttaacctaatagcacctcattttttacattcttccatgccacagcaggggtaagaaaattgtgtcaagtaatttccttcctatagaaagctggctttttgtgtgctatatctgagtataaacagagacaggcttcaccaggatattacttctcggcttcctgaatatttcctacaaatcaagcctaatgactgcaaacaggatttaacatttatatctcaaattagaattcttaccattaactctttttctagatgagactgaaaaagaggtcaaaccagttgacagtgttaaatgtccatctcctgttctaaatactccgtggataccatttcagaactgttgctacaatttcataataacaaagaataggcatatggcaacaacacaggatgaagttcatactaaatgccagaaactgagtaagtattatattagtccattctcatgttgctataaggacatacccgaggctaggtaatttataaagaaaaagaggtttaatggcctcacagttccacatggctggggaggcctcacaatcatggcagaaggcaaaggagaagcaaagacatgtttacatggcagcaggcaagagagcatgtgcagggaaactgccctttgtaaaaccatcagatctcataagacttactatcacgagaacagcacgggaaaaacccaccctcaagattcaattacctcccaccaggtccctcccatgacatgtggggattatgggagctacaattcaacatgggatttggatggggaaacagccaaaccatatcaagtatattatactgtcattacttattgtattttgctaattaaaaaaatatttcctgtgttataaatatttctaattagcactagtaactagatgacaaaaatattcatctcctaatatctacattatcagtgacaaagtattaaaatttgtgttagttaaaatggaaagtataggcataactcctttctttactcttccattcaagaactagtctatgtttgtaaggaaggcaggttctcctttaaaaggaaaagaaatgggctaggcacactggctcatgcctgtaatcctagttctttggaaggctgaagtgggaggattgtttgatgccaaccattcaagaccagcctgggcaacatagtgagactttctgtctgcaaaaaattaaaagcatggtggcacatgcctgtaattctagctacttgggaggctaaggagggaggatctttgaacccaagaggttgaaggtgcagtgagctgtgattgaaccacctgcactccagcctggataacaggtgaccctatctccaaaaaaaaaaaaaaaaaggaagggggaaagaaatgacacacaagagagcagagaactggacattaaatcaagctaggctatggggaagtgaaaataagttagttggagcagtcaaaagcttagatacaccacaaggcagcagctaagcttaaagaagtgcacatttcacattttcagctctcaagagtcttcagataattcctatgagatccactaaggatttgtgacttccaaatgatggaactgttggaaccaatggaacaatgaacttagtgaaagttgctatagaaaatatcaaaccagtatttcccaaagcatgctccgtataacatcagtcttgagagatggtctgcaaaaagtccttagaataaggttgaaaaaaataaccaacaaaaaagaaaaaggttgagaaacactagacaccatagcttcctgttggacattaacaaatgtacattaacatatgccttaagaaatactggcataaactagtttaattttgtttaaaccaatgtttgcaaactttttttaaaatccatgtagatcttttctgaaacttccttgttaattttgtgaggaacaccctttgggaaatattaagcctttttaaccctcatactgaaaactaaggaaaaggaagatctgtcgtatagcccagcagtccccaacctttttggcactgacagggaggggtggatggtttcaggatgaaactgttccacctcagatcatcagaccttagttagattctcataaggagtatgtaagctatatccctcgcatgcatagttcacaagagggtttgcactcctctgtcaatctaatgccacagtgctctaacaggaggcagagctcaagcggtgatgctcgcttgcctgctgctcacctcctgctgtatggcccggttcctaacaggcccggttcctaacaggcctggttcctaacagtaccagtgtgtggcccgggggttgggaacccctgttatagttcatctaagaggttctaattattatagcgtaatctttgacagtatatcattactatgggtggatttataccaactgaaaaattacctttaaataggggaaagtgaagtgaatcaatgttttaaattctctactcagctactagttttctattataccataagaccaaatttaacatcaaaacatttgaaaactccttaacctattaattttagtacaatgggataattttattttacatatgtttctaattgtccaatattgtttatattttgaagtatattaaactgagaactaaaatgttttaaacttatcaaatagaagtgtactagataagtaattgttaaaattattgattattttttattcaacagatccaaaatcacatattctgagtattcgagatgaaaaggagaataactttgttcttgagcaactgctgtacttcaattatatggcttcatgggtcatgttaggaataacttatagaagtaagttgtaaatctgccaactttctctatttgtttttgtacttcattataacataattatcaagccatagttcttcaaagtacatgtctatcaatacgtgaaagtataattatgtacttagcataacttacataaataccaagacagtttttatgtctctgctctgcctttatcatcgagtttaaagttaaatggcggaaaataattttctgaattagtttgttcccgcactgctaaaaagaactacccgaacctgggtaatttatgaagaaaagagctttaattgagtcacggttccacaggctttacagaaagcatggctgggcagcctcaggaaacttacaatcatgtcagaggcgaatgggaaacaagcaggttttactatggtggagcaggagagagagtgaaggaggaggtgctacacacttttgaacaaccagaactcattagaactcactcactatcacgagaacagcaagggggaaaatcacctcccaccaggcccctcctccaagactgaagatcataattcaacatgagatttggatgaggacacagagccaaaccatatcaattttcttttttcactcttttatgtagcaactcaagactaactaaaaatgatcaccatcccatataaatcttcaatacttattttttgtttccactaactatgtgagatgagcaagaacagaatcactctattagtgttgcagttttgggtttataaccctggcttagtttatactggcccacatatgataagcattagaaaaatgagacacatggccaggtgtagcgtcccacgcctgtaatcccagtactttgggaggccaaggcgggtggatcaccagaggtcaggagtttgagaccagcctggccaacatggtgaaaccctgtctctactaaaaatacaaaaattagccaggcatggtgacgtgtgcctagttacttgggaagctgaggcaggagaatcacttgaacccgggaggcagaggttgcggtgagccaagatggtgccactgcactccagccagggcaacagagactcaagactccatctcaaaaaaaaaaaaaaaagaatagaaaaatgagacacatggtctgacaatgggctcgaatatttggaatttggactaaataccaccaatccaaaatatgattgataacaaaattttttaaaacagtctaatatagaggaaacaaggtcttgtttctaaatgcttctgagcatttagaaagatgctcagaaatgtcctgaaaatcatagacattttggaattaggaaaacctttccacggccatagagcatcaaaagcatacatttactctaaagagggtttgataaggggcacaggacaatgataaccaggggtagggaaggaaaagaagctaaattactcaaatctgcctgttttaaaaataggcttctcctttgctctctaacccatctgtttcttggggttaccaatgttttcctgaaatgtttatggttggcagaggggttaatggaaattaaactatcaagcaatagataaagacttggtttaccaagtgaggataagttcatcatagtaggacttagttggcccaaaccttttctctgatgacacttaactacccttgaattaaaatggagaaaaactagctggaaaattctgaggcttcacctgaaagtgactgaagaaacaatggtcttgtattgagccatagagaccacacccaggacagagagattgaaattgtaccctttggtatactttgtagttatattatcagaagcaactgaaaatctattataaattctgaaaaagcatttttagatcagaagactcccttattgttttaccttctttcataaaatgtttgagtaataaaatttctattaaaatatacaggcatatgagggacatatagaaagacatttcaggcaaatggcacatttgatttgaatctcattcttactgacttaatttacatctgtaagttactgttttgggttactttgatatacttatatttaattttttggcccctatacaaggaattctgtttttaaaacagctttgacttttcaatagcagggccatgaatagaaatcactgtaagtcactgtttttggttacgttgatatagaatatttaattgtatttggcacctacccaaagaagtttgtttttttaaacatttttgatttttcaatagcagggccatgaatagaaattactatgagaagccacagtatgtcaactgagagatacattaagccaagtgaaaaaagtgactttttcttaaaacaactttagaaatctaccattgcacatcatattggtcagaaaattgataactttgaagtttaggagaagggaagaggaactggaaggcatgagatgatataaagcagcaaacaagaaccaaatcgtgtgtgcagtgcttctaatgtgtcattgctgcaggcagatgtttaggggtcttgccttgggagatggtaatcaatgaagaccagaaataaccaggacaacattgggtgtgtgtaggtagtgatggcatcaatctttataccaatttataattgtaatatgcctagcacctttttttaaagctttattgcaatcatcactaccccaaaaagaaacacaatacccactagtattccctccctgtctcctagtcctcagcaaccactgatctactttctgtctctacagattgcctgaatgtaaaattctggacattttacataaatgaaatcataccatgtgtgctttttgcgtgtgactggctttttccattaagcataaagattttaaggtttatccacattgtagcatgtatcagtacgttattcctttttatgactgaataaaattccattctatggatataatacattttatttatccatgtatcacttgatggacatttaggtaaaacaacctaaattttaaaccatttttaattattatgtataatgcttctctgaacattcacgtacaagtttttgcatggacatatgtttccatttctcttgggtaaacccctgggaatagaattgctgcatcttttgtttaaccctttgaagaactaccaggttgttttccaaaccagctataccattttccattcccggtatatgagagtactgatttctccgtatcgatgccaacatttgtgtgtttttcattatagccatctaagtgagtgtggaatgatatctcactgggatttttatttcatttccctaatggctaatgatattaagcatcttttcatgtgcttattgaatatttgtatatcacctttggggaaatccctattcagattttttgctcatgttttaaattgagtctttttattgtcgaggggtaagaattctttatatattctggatataaatactttccagtatttatatataaatatataaataatttccaaattattttaaaatttatataaaatataaaattttatatttctggatataaataatttccaaatattttctcccatgactttacttatgccacaaaagtgtttttctttttttttcttctttttttattgtactttaagttctggggtacatgtgtagaacgtgcagttttgttacataggtatacacatgccatggtggtttgatgcacccatcaacccgtcacctacgttaggtatttctcctaatgttatccctcccctagccccctaccccccgacaggcccagtgtgtgatgttccactccctgtgtccatgtgttctcattgttcaactcccacttatgagtgagaacatgcggtgtttggttttctgttcctgtgttaatttgctgagattgatggtttctagcttcatccatgtccctgcaaaggacaggaactcatccttttttatggctgcatagtattctatggtatctatgtgccacattttctttatccagtttatcattgatggacatttgggttggttccaagtctttgctattggaatagtgccacaataaacatacgtgtgcatacatctttatagtggaatgatttgtaatcctttgagtatatacccagtaatgggattgctgggtcaaatgatatttctagttctagatccttaaggaattgccatactgtcttccacaatggttgaactaatttacagtcccaccaacagtgtaaaagtgttcctatttctccacatcctctccagcacctgttgttcctgactttttaatgattgtcattctaactggcatgagatggtatctcattgtggttttgatttgcatttctctaatgacgagtgatgatgagcattttttcatgtgtctgttggctgtataaatgtcttctcttgagaagtgtctgttcatatcctttgcccaattttgatggggttgtttgtttttttcttgtaaatttgttgaagtttcttgtagattctggatattagccctttgtcaaatggatagactgcaaaaattttctctcattttgtatgttgcctgttgactctgatgatagtttcttttgctatgcagaagctctttagtttaattagatcccatttgtcaattttggcttttgttgccgttgcttttggtgttttagacatgaagtctttgcccatgcctatgtcctggatggtattgcccaggtttccttctaggatttttatggtcataggtcttacatttaagtctttgatccatcttgagtttatttttgtataaggtgtgaggaaggggggtccagtttcagttttctgcatatggctagccagttttcccaacaccatttattaaatagggaatattttacccagtgcttgtttgtgtcagatttgtcaaagatcagatggttgtagatgtgtggtgttatttctgaggcctctgttctgttccattggtctatatctctgttttggtaccagtaccatgatgttttggttactgtagcctcatagtatagtttgaagtcaggtagcatgatgcctccatctttgttcttcttgtccaggattgtcttggctatccgggctcttttttggttccatatgaagtttaaagtagttttttccagttctgtgaagaaagtcagtggtagcttcatggggatagcattgaatctataaattactttgggcagtatggccattttcacgatattgattctacctatccatgagcatggaatgtttttccatttgtttgtgtcctcttttatttccttgagcagtggtttgtagttctccttgaagaggtccttcacatcccaggtaagttgtattcctaggtattttattctctttgtaacagttgtgaatgggagttcattcatgatttggctctctatttgtctgttattggtgtacaggaatgcttgtgatttttgcacattgattttgtatcttgagactttgctgaggttccttatcagcttaaggagaatttgggctgaggtgatggggctttctaaatatacaatcatgtcatctgcaaacagagacaatttgacttcccctcttcccatttgaatgcccttcatttctttctcttgccagattgccctggccagaacttccaatactatgttgaacaggagaggtgagagagggcatccttatcttgtgccagttttcaaagggaatgcttccagtttttgcccattcagtatgatactggctgtgggtttatcatgaatagctcttattattttgagatacgttccatcaatacctagtttgagagtttttagcatgaaggggtgttgaattttgtcgaaggccttttctgcaactattgagataatcatgtaatttttgtcattggttctgtttatgtgatggattatgtttattgatttgcatatgttgaaccagtctttcatcccagatatgaagccgacttgatcctggtggataaactttttgatgtgctgctggattcggtttgccagtattttcttgaggatttttgcatcgatgttcatcagagatattggcctgaaattttctttttttgttgtgtttctgccaggttttggtatcaggatgatgctggcctcataaaatgagtgaaggaggagtccctctttttctattgtttggaatagtttcagaaggaatgttaccagctcctctttgtacctctggtagaattcagctgtgaatctgtctggtcctggacttttttcggttggtaggctattaattactgcctaaatttcagaacttgttattggcttattcagggattcagcttcttcctggtttagacttgggagggtgtatgtgtccaggaatttatccatttcttctagattttctagtttatctgcatagaggtgtttatagtattctctgatggtagtttgtatttctgtgggatcagtggtggtatcccctatatcattttttattgtgtctatttgattcttatctcttttcttctttattagtctggctagtggtctatctattttattcatcttttcaaaaaccagctcctggattcactgattttttgaaggttgtttttttgtctctatcgccttcagttctgctctgacgttagttatttcttgtcttctgctagcttttgaatttgtttgctgttgcttctctacttcttttaactttgatgttagggtgttaattttagatctttcctgctttctcttgtgggcatttagtgctataaatttccccctacacactgctttaaatgtgtcccaaagattctgatatgttgtgtctttgttctcattggtttcaaagaacatctttatttctgccttcatttcgttatttacccagtgtcattcaggagcaggttgttcagtttccatgtagttgtgcggttttgagtgagtttcttaatcctgagttctaatttgattgcactgtggtatgagagacttatgatttccattcttttgcttttgcttaggagtgttttactttcaattatgtggtcaattttagaataagtgcgatgaggtgctgagaagaatgtatattctattgatttgggctggagagttctgtagatggctattaggtccacttggtccagagctgagttcaagtcctgaatatccttgttaattttctgtctcgttgatctaatattgacagtggggtgttaaagtctcccactattattgtgcaggagcctaagtctctttgtaggtctctatgaacttgctttgtgaatctgggtgctcctgtattgggtgcatatatgttttggatagttaactcttcttgctgcattgatccctctaccattatgtaatggccttctttgtctcttttgatctttgttagtttaaagtctgttttatcagagattaggattgcaacttctgctttttttttgttttgttttccatttgcttggtaaatattcctccatccctttattttgagcctatttgtgtctttgcacatgaggtgggtctcctgaacccatctcatctgaacagcacattgatgggtcttgactctttatccaatttgccagtcgtgtgttttaattgggggcatttagcccctttacatttaaggttaatattgttatgtgtgaatttgatcctgtcattatgatgctagctgattgttttgcatgttagttgatgcagtttcttcatagtgtgaatgttctttacagtttggtatgttttgcagtggctggtaccggtttttcctttccatgtttagtgcttccttcaggagctcttgtaaggcaggcttggtggtgacaaaatctctcagcacttgcctgtctgtcaaggattttatttctcctttgcttatgaagcttagtttggctggatatgaaattctgggttgaaaattcttttctttaggaatgttgaatattggctcccactctcttctggcttgtaaagtttctgcagggagatctactattagtctgatgggcttccctttgtgggtaacctgacctttctctctggctgttcttaacattttttccttcatttcaaccttggtaaatttgatgattatgtgttttggggttgctcctctcgaggagtatctttgggttgttctctgtgtcttctgaatttcagtgttggcctgtcttgctaggttggtgaagttctcccagataatatcctgaagtgtgttttccaacttggtttcattctcctcatcactttcaggtacaccagtcaaacgtagatttggtcttttcacatagtcccatatttcttggaggctttgttcattcctttttattcttttttctttaatcgtgtcttctctctttatttcattaagttgatcttcaatccctgatatcctttcttccgcttgatcaattcagctattgatacttgtgtatgcttcacgaagttctcatgctgtgtttttcagctccatcaggtcactaatgttcttctctacactgggtattctagttagcagttcctctaaccttttttcaaggttcttagcttccttgcattgggttagaacatgctcctttagctcggagcagtttgtaattacccaccttctgaagcccacttctgtcaattcatcaaactctttctccatccagttttgttcgctagctggtgaagagttgtgatcctttggaggagaagaagtgttctggtttttggaattttcagcctttttgcactggtttctccccatctttgtggatttatctacctttggtctttgatgttggtgaccttcagatggggtctttgagtggacatgctattcttttctgttttttagttttccttctaacaggcccctctgctgctggtctgctggagtttgctggatgtctacccgactctgtttgcctagttatcacccacggaggctgcagaacagcaaagattgctgcctgttctttcctctggaagcttcttcccagaggggcacctgcctgatgccagccagagctctcctgtatgaaatgtctgtcggcacctactgggagatgtctcccagtcagaatacctgggggtcagagacccacttgaggaggcagtctgacccttagcagagctcgaacactgtgctgggaggtccgctgctctcttcagagccatcaggcagggatgtttaactctgctataagtccctgactgtggctgctgcccttttttcagagatgccctgcccagagaggagaaatagggccatctggccacagcaaccttgctgagctgcagtgggctccacccagttcaaacttcccagcagctttgtttacactgggagcgtaaaactgcctactcgagcctcagcaatggcggatgccactcccccgaccaagctctagcgtcccaggtcaatctcagactgctgctatgctggcagcgagaatttcaagccagtagatcttagtttcctgggctccataggggtgggacccacctagccagaccacttggctccctggcttcagcacccctttccaggggagtgaacagttctgtctcaccggcattccaggcaccacttgggtatggggaaaaaagaactcctgcagctagtttggtgtctgcccaaatggctgcccagttttgtccttgaaacccagggccctggtggggtaggcaccagagggaatctcctcgtttgcaggttgcaaagaccctgggacaagtgcactatctgtgccagagttcctcaggctcagtccctcatggcttcccttggataggggagaaaattccccgaccccttgcatttcacaggtgaggcaatgccccaccctgcttcagctcgccctctgtgggctgcacccactgtccaaccagtcccattgagatgaacccggtacctcagttggaaatgcagaaatcacctgccttctgcatcaatcttgcttggagctgcacactggagttgttcctatttggccatcttgccagcaatccatcacaaaagtgtttttcttttgtcatttgtgcatatgtaagaaggctttgcttaccccagggttatgaagacttactcctatgttttctttcttttcttttctttttttttttttgagacagacttttgctcttgtcaccgaagctgaagtggtgcagtggcatgatcttggctcactgctacctctgcctcctaggttcaagcagttctccagcctcagccttctgagtacctggtattacagacaaccgccaccacgcccagctaatttttgtatttttagtagagatggggttttaccatgttggtcaggctggtctcgaactcctgacctcaggtgatctgcccacctcagcctcccaaagtgctgtgattacaggggtgagccaccatgcctggccttccatgttttcttctaaagattttatagctgtagcgcttatatttatgtctgtgatctactttaatttttgtgtgtggtgaaagaaaggggtccaacttcattttttttttttttttacatgtggatatccagtttagaagactattctttccacactgaattgtcttggcatccttcttaaaaatcaattgactggccaggcacggtggctcatgcctataatcgcagcaatttgggaggccaaggcggatggattatgagatcaggagttcaagacctgcctggccaagagggtgaaaccccatctctactaaaatatacaaaagttagccagccgcggtggtgggcacctgtaatccctgctactcgggaggctgaggcagagaattgcttgaacccaggaggtggaggttgcagtgagctgagatcgtgccactgcactccagcctgggtgacagagtgagactgtgtctcaaagaaaaaaaatattaattgaccataagtatgcacaactgtgaacagtttatgtccagagaagagatttctgtggtgacttttataacttatcaatcatgttttaaataaataaaatagttatgttcatttccatgcaattaaacgtatatgtaagagaaaataatatttttttatttcaataggtttttggggaacaggtggtggttggttacatagataagttctttagtgttgacttctgagattttggtgcacccatcacacgagcagtgtacactgtacctagtgtgtaatcttttatccctcatcccctcccactcttccccccgagttcccagagtctattgtatcattttatgcctttgcatcctcatagcttagctcccacttggtgagaacacacaatgtttggttttccattcctgagttacttcacttagaataatgatctccatttccattcaggttgctgcgaatgccattatttcattcctttttatggctgagtagtattccatggtacatatataccacattaccacattttctttgttcacttgttgattgatgggcatttgggctggttccatatttttgctattgtgaattgtgctgctataaacatgcatgtgcaagtatctttttcatataatgacttcaagaaaagaatatttgatgacaaaaatgaaatgttattactgaaggatggtggaattataggtcaatatttatagtttgtatttatattcaaattaaaaatgagcatgatttactgttataatcagaaaatatcttaaagggttatacataatcatacaaccttttagaaggttgggaaaagagaaaattagtcaagtttgaaatcttaactgtataagtgtaattcaagtcttgatttaatctctaagcataggaaaaaatgtttcttctctagataagtctcttatgtggtttgataagaccccactgtcatatacacattggagagcaggaagaccaactataaaaaatgagaagtttttggctggtttaagtactgacggcttctgggatattcaaacctttaaagttattgaagaagcagtttattttcaccagcacagcattcttgcttgtaaaattgaaatgggtaagtatagtaaaatatagagttttctttcactccagggaaagaatataaggctattagttccaccagtgggaatcatacaatcaaatgcttcctctgtattcagtcctgtgcgaggtgttacagaggttatcgaggaaggaaaagatacgggccctgctgtcaaggttttgaccctaaggagtaaaatgtagttgtggagacagcattaaattccttatcattgtttaatgtaaattggtcttagattaattgatacaggcttaaattgtggggaagtcaaaaccgatacattggaaaggggaataacaaaaaaaaaaggaaaggcttcaagaagaggtgaaacttggttggggtttgaaaaatggatagggtttatataaataagaaagtgtttggggaacgagttttaacattccgtgcaaagtgaatgtctctccaccttgcttaatctttaaataaatctatttttaaatatatgttagttttaattttttcacagcttaaaaactgttaattattaccactgtgccctaaaactgtcattactcccactgtgcccaaagctccctgctcactgggagcccgtaaaggtggagtgctggctagttggctcacttacagcgccgcagtcacttcccaagaccgtgtccaccagcaacctccagggattccttattctaacctactttgagtgcatgtaaacttttgagacattttagaaacttagtctctatccccagtttctaggccttctcccagttccctgtttttccccattcttgctcagcaaagcatctttttctcaatcaagctggtctcttcattgtcccaggcacagtgtatgcccatcctcatacttgcacctttatgttttccttctgccaagaagttttccaatttctttctttctttattttttttacatctttaataaacttttcattttaggatagctttagagttacagaaaagttgcaaagatagtacagagcattcccatctaccctacaatcaatttcccctactgttggcatattactttagtatggtacatttgtcacaactaataaaccaatatttatccattattatctttaactaaagtccacacattattcaaatttctgtagtttttatttaacatactttttctttctaggatcccacctaacctttagttctcctgcctccttaagctcctcttggctggctgttttctcagacttttcttatttttgctggccttgacagttttgaggaacactggtcatgtatttggtagaacgtccctcagtttgggttggcgtatgtttttctcatgattaaactggggttataagtttttgagggaagaccaaagatgtgagggagcattctcacttcacatggacagcatgtactattcatatgacttatcactggccacctggcccaaggtagtgtttgttaggttctctgctgcaaagttacctcttttcctcctttccatactgtcttctttccaaggaagtcactatgttgagtccacacttaatagggtagaaagttatcctccaccttcctatgaggggagtatcgatataaattacttgaaattcttctgcacaggatatttgtctattttctccaatttttattttattttattattttatttatttatttatttttttggagatggagtcttgctctgtcacccaggctggagtgcagtggcgccatctcagctcactgcaacctctgcctcctgggttccagcgattctcctgcctcagcctcccaagtacctgggattacaggcacgccccaccatgcccagctaattttttgtatttttggtagagacggggtttcaccatgttggccaggatggtcttgaactcctgacctcaggtgatccccccgccttggcctcccaaaatgctgggattacaggcgtgagccactgcacctggccccaatttttaaatttattcagtcatttatttataccctcatcattgtagtttttttgttatttgtttgtttgtagcacttccatactttctccttaccttctttttattcttgatttcccccaatcctctagacctagtataggttcattgttatttattttatactttggattataatctaacatactgcattctgtaatattttgcttaagtctttccagctttggcccttgggagctctttcacttggctcccatgtcccttgaaataacctcgtcattgtggctttgctgtttgtgcttgttttaagcacttccttactttctggttcccttatttctttttagtcttaatttcacctaacccttgagacctggtttatcaagtagtcttcctgactcttctcattcaaatgaatctctaccaatttcacataccctactggttaacagttttgccatcatttcagccattgttgtttctgtctccaactaatatatgagcttcttaaatcaaagaaaatgtttatgccttttaaaatatcaatcagagaactttaagagcctaagatatgtgtcataccagtaagaaaaataaaatatacatttgacctcccttattaataagaaacccagttttatttaacttttgaaatgattgcatgttgtctcatccaaaagatgtatttgaaataatttaaattttaatcaccagtgcttttaattattatagttgactacaaagaagaatataatactacactgccacagtttatgccatatgaagatggtatttacagtgttattcaaaaaaaggtaacatggtatgaagcattaaacatgtgttctcaaagtggaggtcacttggcaagcgttcacaaccaaaatggccagctctttctggaagatattgtaaaacgtgatggatttccactatgggttgggctctcaagtcatgatgtaagtcttgcttcgttttccagaaacttttcaaatgtgttattttgagggttagaaatttgagcgtaaagtattaacacaaagtacaacattagatgaagtactgggactccgcttgcatagcatggtgctttcttaccttttacaacacagaacaaatagaaaattttactgtagcatgcactaggacaaatgatcaggccatcccaagggcccagtggatgactatctcaacaacacctctatagcctatttgggacagacaaattggaaagctgataaaaatgaaatagcatagaatcagaaaaccctgagtttgagtaccagtagcagatcttccatttatgtgctgggtgatcattaacctttgcaaccttatttcctcatgtagaaaatcagggtaataataatttcactgagattttaacacaaaagtttatacaaagtaccatctaaaattctccacatggttaggactaataaacgtataccttcttcccacttttcctctagaaaattatactacttaggattaattctgctagtaaagacatctgtgccactatttgaatcatattatttaatcatttatgtacttacagtagggtcttgtgtacaaaaaatggttatctattgagactagagttgtagttttaatttaaataatctttagaacagagtggggaagatttttttttaaaagcatggcaagttaagattataaattcaaggaaaattcaaaaatagtcttcccattttgagtttcttgggaagtgtttctcttttctagctccctactgcttggtgtcctctgtagtgtgaaaaatgtagccagagacacaaaacacaaaactataaaacacagaaaacaatattcagaacaatatgaaggttgggattgtaaatttgtaattatgacaaatggaagccatttgcatgttgtttaatttcgagtgtcacataaactcatccttcaaaaaaatctgaagaccaggtgtagtaactctgtctgtaagtttaaagttctccataaactgtatcagagcaaatgtcccaaatcaatgcatcagaagtaaatcagacctacaataatagtaggttcagacctacaatactgtaagcaaataattaatattccattataatatttcttaaagtatgtatgttgttctttgtattctttttgaagtcaaacatctggattcaggttatctctattgttcttacaacagggaagtgaatcaagttttgaatggtctgatggtagtacatttgactatatcccatggaaaggccaaacatctcctggaaattgtgttctcttggatccaaaaggaacttggaaacatgaaaaatgcaactctgttaaggatggtgctatttgttataaacctacaaaatgtaagacttcaatttcagtaacagtacatttatgaaaatgtgacataatttatgcacataattaaaagctcagtggaatttttatttaaagatttattcacaagggccgggcgcagtggctcgcgcctgtaatcccagcactttgggaggccgaggcgtgcggatcacgaggtcaggagatggagatcatcctggctaacaaggtgaaaccccttctctactaaaaatgcaaaaaaaatagctgggcatggtggcgggcgcctgtagtcccagctagtcaggaggctgaggcgggagaatggcgtgaacccgggaggcggagcttgcagtgagccgagattgcgccactgcagtccagcctgggagacagagcaagactccgtctcaaaaaaaaaaaaaaaaaaaaagatgtattcacaaataatttttgtgaaaataattttgatactttgtaaatggaaacaaatacagtataagcactcagggaatttattcccaatgactttcatttgttctgtcaccaggtaaattctaccctagaatttgtgaattctaatttcacttagcaatgtttttcaaaggctgagatgcttatttcaaaaaagggtcccacaacatataaatttggggaacacctcatgtgatttaccgtattaaagtttctaagagagtttcttttcttttcttttcttttcctttcttttcttttcttttttcttttcttatcttttctttttctttttttttttttgacagggtttcagctctgttgcccagactggagtgcagtggcatgaacatggctcactgcagccttgacctcctaggctcaagcagtcctcccaactcagcctcctgagtagctgggaccacatacacatgccaccacacccagctaatatttaaaatattttgtagagttagggtctcacaatgctgttcaagctggtcttgaactaggatcctaggctcaaacaatcctcctgtttcagcctcccaaagtgctgagagtataggtgtgagctactacgcctggccaaaggttctaagagagtttctgtaataatgaagtctgtttaactttgtgtaaccaagcattttccaaatttatatgatccttaaagtttaagggaagagcctcttccattagaggctggacttagggtcacccctggtggataaagcatgaaccttgaggaagaccacaaaaaaacaaactaccggggactgcagaggcctgcaggacaggctggggggtggtggcattggtttccgaagactctggttctcaatgctcaccatgttttctgctctgaagaatcttgaacggcagattcaacatttggttgaacagattcaggccgaagaaaatgtgaaaactttagagaagcaggttaataaaagaaagggagaatgatataaaggatgaggaatcaaggtacaatcaagaactgacttctcagttgttaggcacagaaaacaaatgtaactctttagaaaaacaattggaatacatgagaaataaggcatgcagaaatagagaaacaggctttataggatagagaatgataagatggccagacataagttctgtgctctaccaggttgaagagtgcctcctccccaaagattcccgtccagtcagaaccttagaatgtgactttactgagaaatagtctttacagatctaggtagttgaggtgaggacatattggataatggtgggccctaaatccaatgactagtgtccttataagagggagatacagacacacagagggaaaaagtccacgtgatgacaaaggctgagattgcagtgacagagtgataaaccaaggactgtcggcaaccaccagaagatgagagggaggcacgagacagattctccaatacagcctccaatgaaaaccaatcctaacaccctcttcaattcagacttctagcctccagaactgtgagagcatacatttctgttgttttaagccaccaattttgtggaatttattatggcagcccaaggaaacgaatacaagggctaactttaaaaactggatcttcaaaaaaaaaaaaaacaaaacagagaataacaggcattagtgaagatgtggagaaaatggaacccttatgcactgctggtaggaatataaaacagtgtaaccactgtgcaaaatggtgtggcaattcttcaaaaacatgtacataagattactatgtgatccagcacttcaggtatatactcaaaacaactgaaagcagggattcaaacaggtgtttgtacaaccatgtcatagcagcataattcataatagccaaaagatgaaagcaacccaagtgtccatggatggacgaatggataagaagccttaaaaaggaaggaaatgctgatgcatgctgcaacacagatgaaccctgaagacagtatgctaagtgaaataagccagtcacaaaaagacaaatactctatgattccatttatatgaggtagtacccagagttgtcaaattcatagagacaggaagtggaatggcagttaccagggactagatggaggggaatatggggagttattgtttagtgggtatagagtttcagttttgcaagataaaaaattttagagatgggtggtggtgatagttgtacaacagagtgaattcatttagcaccacgggactgtacacttaaaaatggttaaggccagatgtggtggttcatgcttgtaatctcagcactttggggggctgagacaggtgggtggcttgagcccaggagttcaagaccagcctgggcaacacagtaagactccgtctctacaaaaacgtgtaaaaattagctggacacagtagtacatgcctgtaatcccagctacttgggaaactgaggcaggaggatctattgcacccaagagtttgagactgcagtgagctatgattgcactactgcattccaacctgggtgacagaataagaccctgtctctaaaaacaaaacaaaaccaaaatggttaagatggtaaattttatgttatgtgtattttaccacaattaaaaaaaatggatcttcttgaacaggaatgtaacacacttaccacgatgcaagcccttacagaaaaaaaaaaaaaaagagttggaagcaaaacttcatgaagaacaagaagaaaaaaaaatgtacgcagcctaagagaccccagttgcagactatactagaaacaaatagaccaaagataaggcagttccttatgttgccagtgcaagaagtaatgttaaaaaaaaaaaggtcaaaccattcagaaaagttccctatcctaatgatgccataataatcaatgttcaacaagttttgcattaacaattgagcccagtgcaacaatgagtaatcagcaatatacctttgcccaaccaactattttcataaggtggtaaaaacaagaacttactagtaacatttcttttcaacagcagcattgatgaggagttgtgagaagttttatagattgtatagatgaatttggcaaatgcattttgatctgcagcagctgggaaacttacccaggagtccaactgctgaactgaagacttagtactcaaattggtgtgttagtgagaagaatggaggcaaaagccaatcaaataaccgaagttcaaaaagatcaagtctggtttctaacagaagatagagaagcagcagaaggaactaagggccactaaagagtctcacagtagccgccattcctctctaatcacagagaccacaaataaggactctgccaagtggagatttggagaaaaaaacagaaaaagcctttacttactgaaggacataaagatcatacagaatgcattacaaaacaatagtttgggttgagattactgactggtaccaggtcagatatttgattcagataagctgtaccgcactaatacgacattgacaatttactttccagttttcatatgctcttcggttggaattaaaaacaggtgttaaagggcacaagctgcattcctcaggctgcttctgttactcagcacaattaaaaatcaatttaaatggaaaccaggggcatttttaagagctaagaagccactcctagtctttttttgtttgagtgatgttgcggtgctgatgtattatgctttgtaaaacaaattagctatttttaaaaaatagttcttcttatgactaagtaaaactagatttatttagattatcaaaataaaaaggaatccaacgggctaggcgctgtggggtcacgcctgtaatcccagcactttgggagcctgaggcaggcaaatcacttgaggtgaggagtttgaaaccagcctggccagcatggtgaaacttcgtctctactaaaaaaaataataataaacaaaaaaaggaatccaaagaaagaaataattttaattattatttcagagtactttcaggtctgcctggcctgtctttacttctttttctagtctgtctttctcattgtttctactttagtccaaatcagtcttagaaagctaaggcactttccacttctatcacctaggttttttaaacggtattccaaaaagttaattaaaatatgtatttatagagtgtgggctgtggctttctctggtatgagttaaatgctactcaaccacaaacgcaacagttccaatcagggacattgaagtagattttgaaaggcagtcttttttttccatgcattgttacaactgtgtctaacatttttatagctaaaaagctgtcccgtcttacatattcatcaagatgtccagcagcaaaagagaatgggtcacggtggatccagtacaagggtcactgttacaagtctgatcaggcattgcacagtttttcagaggccaaaaaattgtgttcaaaacatggtgagttaaaatttgttgattttcttatgactcaataatttttagaaatgtttcttaaggatataatttgaagcaatgattgtatttttgaaaatatttttaaagcactttccatttctaatagcgctataaactaattgcccagtggtagggaaatggttaagtatctgatgacataggaactcaatgaaatattggaatagccattaaaaacgcctgtaatcccagcactttgggaggccaaggcgggcagatcatgaggtcaagagatcaagaccatcctggccaacatggtgaaaccctatctctactaaaaatacaaaaattagctgggtgtggtcgcacacacctgtagtcccagctactcgggaggctgaggcaggagaatcgcttgaacccaggaggcggaggttgcagtgagctgagatggcaccactgcactccagcctgggtgacagagcaagactctatctcaaaaaaaaattatcaatgttaataataagtacatggaaaataataagttggaagaagtagaattttaaagtggtggctgggtgcggtggctcacgcctataatcccagcactttgggaggccgaggtgggaggatcacttgaggttagccattaaagactagcgtgaccaacatggcgagccctcgtctctactaaaaatacaaaacttagctgggcgtggtggcgtgcacctgtaatcccagctacttgggaagctgaggcaggagaatcacatgaaccagggaggtggaggttgcagtgagccaagactgtgccactgcgctccagcctgggcgacagagcaagactccatctcaaaaataaataaataaataaaataaataataaaaataataataaatgtaaaataataaaataaaagtggctaagtgaactgctaagtaaaaatactgacaaatgattggaaacggttttacctatagctagatatgcttagaaaaaggaattaagaggtaaaatttttgtaaagttagctaagtagtaaataaaaattatagttgttccattgcttagttattaatacataagcttagcctcaccagggtaacaaatcaaagtagtatggttgtccatccgttctgcaataggattggccacatcctctgaccaccataaagggcagtgctttttgccttcagatttagctattttagaaagagtagcaatgattggctctttcccgtgacaaatttgatccatagtcaaactgtaaaatgacttctaggggaactacctagagtatttcaaagaccaaaacttgtttacctgcttccttgggtagcaaattagccaggtagatggatggcatttatctaatttattctgataaccgttgtggagacacttgactgattgaaaaatcttgtagttaccgggaacttttgtgtgggaaccattcggttttatacctgaatacacatgatggaaactgttgtaagatatatgtatgttttgaaagtcataaacctttttctcctaaaggagaaaacagaatggtttactgtaaaactaatatgtaggttaagcacttaagacttggaggcatgagggtctgggttcaaatcccagttcccacatatcctagctaagtggcattgggaggttacacaactctttctcttttctcatctgaacagtcagagaggtctcaggggtaggcagttccagggccaaaaaaatattgccagataaatattttgaagaaacacaaaatttctttatacgtgtttggaagtaatttttttgaagtacttataaaattttgacctaaataccagtttttaaaaactgtctctgtgtaaggcttgaatttatcaatgatcttgttaataatatatgtatttttcaaatggctagttgagaataaactacttctctagtttccataaagctaattgagaatgtgttttctttcaacagatcactctgcaactatcgtttccataaaagatgaagatgagaataaatttgtgagcagactgatgagggaaaataataacattaccatgagagtttggcttggattatctcaacattctgttggtaagtgaaataattgtatgtgtagtgtgcaaagagagttctaactcatcctaaataacaagtcgtccttgctaaagaatgttaagtagtggctaattcagatgcctcttctggataaataagctaggtcgctggctgttctggatggttataaattttgaatgaatccatgagttaacttagcaatgacggaaaccactaatgacacagaaaatcctgttaaataaagtggaatctttctagaggcttatttctgggatccttggatcaacatcaggacattttcttctccacaggaatgtctgtgtccccacaaggaacccatgcctgccttctcttagagttctagtgcctgtcaccgcatggatttgcagcttataacttcgttattcagaaagttatcttcttgttattcccttctctctaagaatatttttaccactggttaaaattatgtcttaatagtaatctttaaaaactgtcttagtgttaggttggtgtgaaagtaattgcagcttttgccattacttttgcgccaacctataaaattgcagataattgattcaaagaaaatttgtggaaggattttttaatacgaaatagtagatacagggtttaggtgaacttggaattggtagaaataagagtacaaatatgacagaagataaggtttttcacattttatgcaaagttgaattttaaattattaaaatgtgaattttaaaatgttaagtacttgtcaaaaaataaaaggattccaagttgtccatctaaatgaatcctaaatcgtgtttacactgtcaccacaaggtggtgccacttcagctggaaagcaaaaatggagtcctggtggtggtgtgggagaaaggtggggatggagattcctgcacccttcctcttccaccagcatatctttaatgatatgactttttacaattagagtaggggaaggatatgggtccttagaaatctctccctcacaaaataaatgtgcaagcattctgcactttaacggaaacaccacattctctatctgtgttgtccaatagaactttctacaaagacagaaatgttctatatctgcactgtccaatatagtagtcactggccacatgtggctcttgagcacttgaaatgtgactagtgcaactgaagaactgattttatttttttcatttttaatgcattttattttaacaagtggctctcatattggacagcacagttctgatgagttacatgaacccatgcttgtaacttactagtttagtggcagtagacatagttgtatttaatttctttcttcagaccagtcttggagttggttagatggatcagaagtgacatttgtcaaatgggaaaataaaagtaagagtggtgttggaagatgtagcatgttgatagcttcaaatgaaacttggaaaaaagttgaatgtgaacatggttttggaagagttgtctgcaaagtgcctctgggtaagtatggaacctgtccttaggagactttttgcagaacagtcaggaaataaatgtacaatccaattatgtacaaaattctgtatttagtcttgaagtatttagtccttaaagtatatccaactatcttgattaagtcatagagatttccccctgaaaaatagattacaagggacgataactgcacaagatgtccaggactccagtctacattttatataattctttcctaagaaaaacagaagttgccagggtattagggaagtaatttcttttaaaatgttcttgagatgtattttattctatagtttgattatataaaagcttaaaggtctatttctgcagttaatttgcttcctttcttcctaatcccataaaactcatggttaattttaaaacaatgcaaaactggatttagttattgaaaacattcagggtatctataaaaaatcataatttgaacttacatttcattatgaattgatacataaaattaccattaaaatgttatattaacttcatttctggagaaagagctccaaatttttcacagtaacatttttaaagatcttgcataaaacttttgcttcttgtatataaatattaaagataaaacctcaattctaggtaatcagtatccatgtatacacacactgagacagtaaatagagtgtctactatatgccatgccctgttttgcacactgggatgcacctgagaacaagacagataaggtacctgttctcacagagattacaatctggtgaagaaagataagtaaacaggtcaattttttaaagagaggaaaatatcaaatagttataaactctatgtgatggagactcagtggatagctactctagattaggaaaccagggaagaagcctagaagcaggagacaccgaagctaagatctaaaaaatcaagccaagcaaacttcaagggaaagggcataacagacagaggtaccagttggagcaaagagcctaaggcagaacaagttggctgagcgctcagggaagaactgaaaggtaggcaggtgctagacatacagagctttggaagcaaggcttgagttctggttttattctgagtggaatggaaagcaactggaagatttggggggttgggtgggagcagagttagggtgttgcaaatcaaaagttctacgttggccattttgagttatccatagagggacgagatgtgtagtgtgcatagcaatggtatttaaagtcatggaacagagcgaatccatctgggcagtatgcagataagggtcttggaacagcagctgcactaaatgaactcatctgagagacttaaatcattttgaagcaaataacactttatttagccccaggtaagtcaaaaacaaaaatttatagcttttagcaatttgctatcaaagtaggataatatacaagtagtgatgttcccaaattggtgttaggaagggggaatgtgagaataatcatagcgcattaatgtctttggaagaaaattcctatcacaatgaagaggatttgaatgaataggaaaacacttacatttgaaaagaaatcacttaagtgtttcttttgatctgacgatgagtttgaattctatgttagcgctatgaaacaatcagatttattatgtctgtatacagcttacaggtttacatgtgtgacacaacccataatgtataaaatcaataatgatcacttttgtattctctcctccaacatcaaaccttttcctgttccaggccctgattacacagcaatagctatcatagttgccacactaagtatcttagttctcatgggcggactgatttggttcctcttccaaaggcaccgtttgcacctggcgggtttctcatcagttcgatatgcacaaggagtgaatgaagatgagattatgcttccttctttccatgactaaattcttctaaaagttttctaatttgcactaatgtgttatgagaaattagtcacttaaaatgtcccagtgtcagtatttactctgctccaaagtagaactcttaaatactttttcagttgtttagatcttaggcatgtgctggtatccacagttaattccctgctaaatgccatgtttatcaccctaattaatagaatggaggggactccaaagctggaactgaagtccaaattgtttgtacagtaatatgtttaatgttcattttctctgtatgaatgtgattggtaactaggatatgtatattttaatagaatttttaacaaaacttcttagaaaattaaaataggcatattactaggtgacatgtctactttttaatttttaagagcatccggccaaatgcaaaattagtacctcaaagtaaaaattgaactgtaaactctatcagcattgtttcaaaatagtcatttttagcactggggaaaaataaacaataagacatgcttactttttaatttttatttttttgagactgagtctctctctgttgcccaggctggagtacaatggcgtgatctcggctcactgcaaatctccgcctcccaggttcaagcgattctcctgcctcagcctcctgagtagctgggattacaggcaactgccaccatgcccggctaatttttgtatttttagtagagatggggtttcaccatgttggccaggctggtctcgaactcgtgaccgcaggtgatcctcccgcctcggcctcccaaagtgctgggattacaggcatgagccaccgcgcctggcctctgcttactttttatatagcaaaatgattcctcttggcaagatgtttcttatattattccaaagttatttcataccattattatgtaaatatgaagagtttttttctgtttataattgtttataaaacaatgacttttaaagatttagtgcttaacattttcccaagtgtgggaacattatttttagattgagtaggtaccttgtagcagtgtgctttgcattttctgatgtattacatgactgtttcttttgtaaagagaatcaactaggtatttaagactgataattttacaatttatatgcttcacatagcatgtcaacttttgactaagaattttgttttacttttttaacatgtgttaaacagagaaagggtccatgaaggaaagtgtatgagttgcatttgtaaaaatgagactttttcagtggaactctaaaccttgtgatgactactaacaaatgtaaaattatgagtgattaagaaaacattgctttgtggttatcactttaagttttgacacctagattatagtcttagtaatagcatccactggaaaaggtgaaaatgttttattcggcatttaacttacatttgtactttatttttgtataaaatccatagatttattttacatttagagtatttacactatgataaagttgtaaataattttctaagacagtttttatatagtctacagttgtcctgatttcttattgaatttgttagactagttctcttgtcctgtgatctgtgtacaattttagtcactaagactttcctccaagaactaagccaacttgatgtgaaaagcacagctgtatataatggtgatgtcataataaagttgttttatcttttaagtaaaagtaaaa

SEQ ID NO: 2 - DNA, 101402 bp, Homo sapiens
  source 1..101402: mol_type = genomic DNA
aggccgcgctcagcaggcggggcgggagccgcgtgcgcccgaggacccggccggaaggcttgcgccagctcaggatgaggacaggctgggcgacccctcgccgcccggcggggctcctcatgctgctcttctggttcttcgatctcgcggagccctctggccgcgcaggtaaccgcgggcacgccagccccgcagtccgctgggtgcctcgacgccacagctctgctgccttccagcctggggcagggctgcgcccctggggcaggtcacggctgctttgctgttggggcgggggggctctggagccggaagagtgagtcgcaggggaggtctggcagaggaagcgccccagtgccctcgggggcccggaggagggcgcggtggatgtgggaggacagggcccttctggtgcagaggggacgcggtgcaccgtagagtaggcgcacggaggcttttttggccgggtgcgctgctccatcgtcgcctctcttatataatgttgctggagtatggggttccccatctgccctcttgcgtcccgtccctcccgttctcgcttttccttcggcccttggtcaccttggccacagggccaagaggagcctccacccacagcgccaaggattccccacgattcccggatttcactgcgcctacggtgcgcatcaggaaggaagtcaggttaaataaaccatctcctccgaaagtgaccaagaccaagagtcagctatgatgccctcacccaccgcctagagcaacaaacctttcttctcattggtttatcagctccaaatgaccccgctcccccaaggctgacagcctcacggtgaagggcaggtcgcctgcttggggacctgctgcctctcactgcggaagcaggaccagaaacagacagccttcattgatgttcagggtagtgccagccccaccacaccacaccccttggcagcaaccggttgcttttactttctctttttgcctgggcgaggggtgtgcagagaactttgtttcttggttggactgcatcatgggcactcaatgggccaccctccaccggccacttctgttatcgtgcctgtatgaggaaggaaaagattgtccaggcagtttgaaaaacattaaattgttggtggctcttattttctttgcagctaagctaagttaccatctggtttagacttccttcggagagcgatgggaagagatttctcagagtgtgaatggcatcatcctatctacagcaaggacctggaaatgaaccctgctctgagtcacacttctctattctcctttgaccctgtgtgctaggaactaccaaaagaatcctttaaaataagatcctttattgccttgataatttattctgcctgccccacaatccaaggtggaaaagttcactgcagcaactaactacagtgaaaatgcactaacttttcaatcactaacctcttggttcccatcgacatctgcttcagtcctgtttttatctccttcacaaatttcaggatttccctaattcttgcaatctctgcaatcactgccctttatcactgacccaaagcaaaaagcaccaggtttaactctgttccccctgtgctaggtccccacaggttttgttatcctgtatccttccttactcctagcagctactctgatcgattttctctcaccctcagagcagacttgtggccttgtttggggaagcactggaattttgaacccccagccatttgggtcaattgtttggcaagagtgtccgcttcatgatgctggtgatggcatgcacctcgtcacatgtgcacggctaggcttgtgcaggtggcctctattacccaaacactgaaggagcccctctgtgtccttggagagatgccaggtgcttagtttacatttttgcctgcttggagagctaacagcttgaagtaaaccaatccatcagggactcctgaggttttcaccagccaacaccacccaatcgtgcgtgaagactttctgactccctggacattgccatggactcaactgtcacttcaggacctgtttttgaactaacaaacctagacttctgattctctcttgctgcacctacctgtacattccgaacacatggtagagactctacaaaatgcttaatatgtgatctatggacggttcccctgaaattataaatgctgccatcttcatccttcttgttttcccaagctatttccctatccatttgtctgtggttataaatgtcaatatccagcttctctttggaatgtgtgaagctctttggtctagggaccaaaggcaggaattatttagtgatcagacaataagaaaacactgaaagagatgatttgcctttgatggatgtaaaaatactaaaaatttattttcaatttatggtaatgctacttagccattttctctcaaacaccactggagaatttatataacatgaagcatatacaaaatgcatctagggggtaatgaggcttctcttcatcaacttctgccttttagatttgccccaatattgtacttggaggtaaatattaaaactccattgaggactggtataaagttgtaaagtgaacaaaacccagtagaaagctattgataaagaatctattttataaaataagttttatacaataaaatctactctgtaattaccttttcaaagtatatttctaaaatagcttatatgcccttctgtaccaaattttctaaataagggattatgttcacactttctcagtcctccttccagctcttcaacctactatcccaataagggtcgtaagactgaggcagtttcaacagctcctgctaaggttaaagaaagatacggggaagcatcatgaaaggataggactctccctatctaatgtatgtttatacataccttatatatggaggctaataagtttcctttaagtatatcaataattaagatctgtactaagtgaccactataagtgtcacattgaaattgcatacttggttcaaacaagggattagtctgagaaaaacatctatattcagagatgtagcagtttgttaggaagtttggcagctccactttaacatagctactccacacctctcctgtagtgttttagtgtttcaatctcggactcctaactcctgctttttccactgtataaagaaatgtagctaatccattggattctacaaaaattttgaaaaatccagaactgcaaactgcaaaggaaggcaaagctgctgcttccccagttcacctgtttgggatccagcacacaaagcagaatgcccgggaaagacagcagcaagactacagggcaggagaggggctgtttccaacaagggtgatgggcacgtctcctgcaggagcagacttcttttttcttctgtaatttttgatactttggaatgcaagatttattttggagaggcaagagagaatactttggaaaagatgtagatcagagatctgagtagctattgaattgtgggagaaggccatgagagaaagtgtgagtagtaatcttatagcacattttccttttttgttgactgtcttcccagcctgtgtccatcaagtagaaaatggcagaggaatgtcaaagaagaaagtgtgagggatgtggctgggcacggtatctcatgcctataatcccagcattttgggaggccgaagtgggtggatcacctgaggtcaggagttcgagaccagcttggccaacatggtgaaaccccatctctactaaaaatacaaaaattacccgggtgtggtggcaggcacctgtaatctcagctacttgggaggctggggcatgagaatcacttgaacctgggaggcggaggttgcagttagctgagattgtgccactgcactccagcctgggcaacagagcaagactccatctcaaaaaaaaaagtgtgaaggatgaaagctgctatggcaaacatccttagctgcaatcctgtggaatacttttaaaattcagatttaaaataactttaagctttaaaggattgttgttgctgttgttgtttctcttgtcgttgcttctgttatttaaaacaaaacaaaaaaatccttccaaagttcaagctgcagtgagacttaattttatagttattatttacatggtaaaattcccctcaagtcaccagtccctggtatgggaatttttaactctgaaagcctttgaattattactaggaaaagcatctggtgttagtgaaaccagtgactgtgaagctggtatcaaaatgaaagtgccttttgggaaccaaaattttacaggtctttctgctgaactctggttcactgacagtgattgcttaagcttgtctaaaatatttcagctttactcttatcaacatgatttgtgctgtaattgtttaaaattttcctttgtaaaataactaaccaaattatctgattatagtttgttgtaacagatgtgaatcttattccacaaactcaggtgtgcaagaaacaatgcattactttattttcagaaatccaaattaaatttgatgctgagctcccattccaccaggttgccagaacttcaataattgtccttactggggtctttgccagctcatgcaaagtgccaggggaacattcagggaggattcttctttagtcattggatcccgctggttacctctgggttttccattgtccaaacccacaggatcttgtatctggtggctcaagactcatcagccatcactttggtagttcctggagtttggggttcagccttcttaggtgatccacactgtcaatccccccaggctttccccaggccctgtcgccttcctgagggtgccacaagccagtgtatggctggatagttgcagacgactgtgatgaaactgaggacaatgaaactgccacagtggagctggccacaggttctaccctcagaacccagacctctgtttcttcttgtttctgtaccccactgttctgctgctccctcagaaatttccccatttcctctgagatacctcaatgaatttaggtctccaaaaaatatctagggggaagtggtctttaagaaaattgtccttaagttttcctttttagtggccccactaacttgccctaaggcagaggagcacagaggcctcactatgtacttggatctgaagaaaggaacatatatatagtgcacatgctgtgttaagcatcgacttttcatgtaataatttaccctgccgtagtagctaacatgtaagcaaggcagaattatggtcccaactagacttttcattgagatgaaaactaaagagcttcttttgtcttattaaatgagaagggaaaaatctttcatgaaatagcaacaacaaatatacatgctactctacacgctttacatggattagctcctttcatgctcacaaccatcatatgaaaactggagcacagaggttaaatgatttgccctgatcctatggctaacaagtagcaggagcaaaatatggacccaggcggactggctccagagcccgtgttctgaccctacacactgcactgcctctctgctcaccactgtcccaccttttgtagtcccctgcagcttaaaaagagtgggaacagactgaggatgggaacagtccagtagtgctcagactctcctcagcaggcagggagcaaggcgcttcaaccacataatctacaatctgtctgtccatttgactcagctaatgaccccttcaccatcgtccatggaaatacgggcaagtgcatcaagccagtgtatggctggatagtagcagacgactgtgatgaaactgaggacaagttatggaagtgggtgtcccagcatcggctctttcatttgcactcccaaaagtgccttggcctcgatattaccaaatcggtaaatgagctgagaatgttcagctgtgactccagtgccatgctgtggtggaaatgtgagcaccactctctgtacggagctgcccggtaccggctggctctgaaggatggacatggcacagcaatctcaaatgcatctgatgtctggaagaaaggaggctcagaggaaagcctttgtgaccagccttatcatggtgagtattagagagggactttgaccgatttgctgttgtgcttgtcacatgtggcattaaacatgcacaatttagtaaaaatagagtcgtacattagtaagggcagtgagtaagctcttcacttccaggcactgtgcagttactttgagcgacattcttacaagtccatggtatttgcctctactttgcaggtaaggctaagagagataaagtgccttgtctgaggtcacacagccatgttgtgataaacctgggatttcatcagatagatatgtacttcttatgatggtcttctaaaccctagaggaaaggaaaccctagaggaaaggaatcattagatttgtacaggctaaaagtcaaatgatctaataatgttgatcttattctaagttttaaaagaagaagaaaggtcaggcgtagtggtgcatggttgcggtcccagcttctcgagagactgaggcagcaggatcacttgagcacacaggagttcaaggctgtagtgtgtaatgatcacgcctgtgaatagccactgcacttcagcctgggcaacatagtgagacacccatccttaaaaaagaaaagaaggagaaggaggaaaaatatattttttcttgcctacggattttgaataaaatgggaaaattttgagtggattttcttatttattttcatttttgcatggcaaccaaattttgatgtttatatttatgattcagcattttaagagtggagtttttcagttgcttccgaaaataagtatattaatattgccttgcggggagcggaccatggacttagccctgagtctagggactggattgcaactaatttctaagttaaagaatgagtagatttatttttttaaccattaaatgtaattagctatctcccaagcaaatatttttcattatgttgctctaaattacaccaaatgtcgatatgcatataattatgtcctctaagtcctattatttccccttgcctttctttacaaatttccctagctttacagtggctttcttcttctcttaaagatcatttaagctaaatttggcctcaaagtcactatagcagcttgctcccatactttccattatccatctgcacaagtttttctttctagctttctatttcctagtgaggatgcaagaattattctgagaatgtcaagttctgttgtggagaaatattagagaattagagatagggtttccttttcatcattccctggcctttgaatagttgacagtctgtttctgcgagccagtttcctcctaaaagtaaagcagttgctttttggatatgacttaatggcaaatttaaattctgtgccacaaaagcccttctccaacttgccaactaagaggaaacacagagccaaacaaaatgccttttaattggatttaacttgtttcattgtatttgtccagggatcagaaaggataattttcttggcagggttcttttagtctcctgatctaattcttttgaggggcatagttgtaatcttaaactccctcagtccccagtgtcttcatttcaatataactggttttcctttttatcctatgtattttatgtatgcatttctaatgttcttctgagacagggactgtggatttcacccagctgccaaagagatcagtagcacaaaaaaggttaaggatctacccaggggaccacccagagagagctaagcaatgccaccagcataacccaaaggcatgaagtgtttcttgaccttttcaaatataatatttgaaacactaaagctttttttaaagcatatatagttgtgactagtcaaggcatacctcaagttttaatttgcacagaaaccagggccaaacttgccacctcttctctgtttctgtctgggtgactggtaccatctaagttctacatgtcagaaatcagcaagtcacctgagaggtttcaggctcgcctcttccaccactccaatataatcaaatatgaagtcctggcaattctacccttttcaatttatgtatatcccttcttgttcttaggttagggactgctgtcttaagttagggactttctctaggactccgctctcagactctcgatactgattgttgtccccaccttcttatctagcagtatataaacaaaacatacaagatacccaagtcccaacaaagtgaaatccaaggttacctggtttgttacagcaaagctagggcttaaaaccagtattccattccccaaacatagcttctttctttcccccttggctttagcagtataaaccaagttttcacttgtgatacaagaacattaatttatcactgtgccttgggttgcctctcaccccaactcctatcctgtgtgagtcgtgttcatctcagagaaaactgaagttgtataaattttatgagtgaactgcttttgactagcacccaggtgtacattaatatcattaagataccttgatctcactagcacttttcaaattttgaatgtttggtgaatcacgcagaggaaatggactttttgtggcagggtggctgcagaactatcagaattctgggcaactcttagaagcctgccaacaacctctttatccattgaaactattttgtctcatgttactgatgacattaatttgctagttttctgcataatcacctcatctcacaaatttgtaactattgcataataaagctgttgttttaaggatgctatcatcataaatttgcacattcagagaagattcttcccaggaaagtctgtcttgctaaggaagcccatggtgtgtaagaggccagcatcagcaaagaatgtgtgggaacaaaatgcttagtgaatagttagcgtaatttagctgcttctggtgtggtggttgtatgcttatcattcttcaaagcatatattgtgacttagagagcttattaattgaagcccagctttgagctatgaaatttaacttgaaacttgagaaggcacccgctgatgtcacaagttgtccttataggtcaagagtctaatcagagagagcccattctcattcctgtcacttgcagctgagtgcctgaatgtatcacttgactactctgcaaaaatggggatttcccagacaagtataatacctcccctatgatctcacaggtttatgataaagaacaaatgacagaaatgtataccaaggcactttgtattccaaaaatcaaaggttttagaaaagaaaactgatggctctacaaggaacagtctttgtgttcagggactgtcctcttaggtttgtaatatgggaaaagaaactggtcatgagctattggggggttttgatgcggttaaactgaaacataggtaataagcagaatccttataaaatataaggtcaacacactctttaacagaagtacgcttttgaaaactgtttctatgacacagcaaaacaaaaccagtgatctttaaaagactatttgccaagaaaagcatccagattattattaccttttgctataggtctgcttattacattctaagctgttaaatggcctcacactttagttagacggacactggaggaaaagaaagtagaatcaaatactgtcttaagcacacttttaagcaaatctgtgagacatttggaggaaccctaattgcctggtaaacggtgataagatctgattactatgatttacctaatggccattatttgatctgttaatgactgaggtttttagcaaattgtggaccgaggttttggcaaattgtgacagggatacagggatagctgttctataaaaacacctttccaagagaattagtattgatataagtatcaaacattctttccagcatttccaggcatatttgaggttggaatcacttttcagttcctccccatgtaccagggaaaatgattgaagtaaaagctatgtctactacctcactggccccccgccggtcacatgactgccccattgaagctgctgcttctttcacaccccaaattaccatgccttgtaccttcccaagaatctgctcagaaattcagcagctcttccttttacttcctcaaaaaccacagtctcaattctacctccagtctctgaacaatgggactatttgtccatctttctaatgccgcaggtggttccaaagtccacacccaccctcagtggttccaaggaatttttctggctccaacactttctaaagaaaagaaaatagaggtaaatgtaacctcagccagggcaccctttctggtgaagtgctctgcggcccacagcagagttagtagaccctcacctgatcaagccaggctctttcagcgcctcatcacaccacagtaagtgaagcttcacatggttgatcactgaacgctatccccagtttgcaaaagcagaaacagaggctactagaggttggatagctagcccacaggcaaacagtgggttagcagggagccagcattcatatccagacctgacagcacccatgctctgaattcctacactcggatattgtattctaaacaacgtttcttttaaaaacagttttagaaattagccacctgacgctgactacccagtttttaactctcttttccccaacttcctctccaacccagagatctataccagagatgggaactcttatgggagaccttgtgaatttccattcttaattgatgggacctggcatcatgattgcattcttgatgaagatcatagtgggccatggtgtgccaccaccttaaattatgaatatgaccgaaagtggggcatctgcttaaagcctggtatgtatgggctggtaaattttatgtggaaaggtagtacatttatatgaggcaatagggagaaggaagagttcaaagtgactcaaaagtgactgcaaaaatattatcccggataagaagtgtatgtttggaggagaagagagaggtaatgtgtagccatgaatttgccttcagaagcaggcccggaagtgaaccaaggcggatggtgtcatggaggaggaggagggagtgttccatagcaccccagggagaggaagtgtggaaaaggcatgcacaattaggaaattgctgctgacctttagtagtttcagaagactagagggggtagaagctggattgtagtggaatgaagcatgaacagaaggaagtaagcctcgtaagtttcacggagcagaagaagagacagttggcaaaggacaaaattgcaacaaatttatgtagttacaatcttatttggctttattgcaattctagaatcaggcaacacctcatttcataaaatagactactgtaagtgttccagttcgttgaacagaggggattggctttgtagacagaaaaagggctgaagaaagcaaaaacagaaaccgaagagtggattggtcatttcaacgtaactttccttgtaagagcaatagagaaataattgattggtcaacatcaggtgacttcaggttaagcattgaaacagagggaacttcattatcagtccaattaaagattgaaactggcctgttggggaaattaggcagttgtctctctctcctgatttctcaaaagaccagatgacaatctgtttcagtttggtgatgtggaactttggcatgggtgactccattttgatttttgagtcctagatcaggagcttagtccaaaacagtggcttttttttatttaaaaaagcaaagggtagtttaagaaagagatcagttgaaaaacacttttagaatggtgaaatcttaagtatgtttatggcctgaagcaaagagcgggaaagagaagagatagatcttcctggctcaaaattggtgacactgttccttccaccattcctgtgtgtttgtcagagtgctttttctcgttactttttaccagaagcaaactgttcaggatttgctaaagaatttgctgttctttagaaagacagagagagaccaaagtagcaatcacatcattatctggcacataactgagacacagtttctcaccaattaggtgagagttacaggggatcacggtacctgacatgtgataggtactcacaaaatattacttaatggacaataggttgaaagaatctatagcaaagagaaaggaaagagctccagacctaagtaataatagttaatacttaacagggctctgccaggtgtcagatactgtttcaggctctcaatatacattaactcattcagtcctcacagcaaccctgaaaggtaccatactttatccccattttacagatgatcacagtgaggcacaagggagatatgtaacttgcctaagatcacacagctaataaatatcagaactagaattcaaacccaggaagtctggctatgaagtccttgtcccaaacagctacactaggctgactcattgagtagctagccaggtggtattagtaatgctgatccctccttcgggaatgtgagcttcagaatgcagaagctcttggagagcttggagagattatactgggttaagacttaagatttcagggtgcaacagaatcacatggagagtttgttagaacacagatatctagggcccagagattctgattcagtagatttttggtgggccccccaaatttggcaagtttccaggtagtgctgataatgctggtctgggaaccacacttggaggattacatatctaattagaggcccaggcttctcaacacctgtaacctacctactaaaatagaaaaagccagtattttcttcagctataattgataataagcagagtttggtcagccaggtatcaacttcatttaactctccttatcatttggatcagaaatttagatgtgaaagtttgcttagaggtaatccaatgtaaacccctgtttctcaggtgagaggcagaaggcccagatcagtgaaatgacctgtcagggtcagaccacatttttgtggacactagtgaaggattctttatcctccttccccactgtacatatttacccccactgtaccttgctgccttgacaggaatgtatcttggtgcctttagcctcctgtgggtgttgtgtgtgtgctggggctttgggggtgtgacacatacagtggtgttaatgcatgcatatgcttcctagagttactttttatggaagaagcaagagaaagtttctcaaacctgagggctgctaaatcatggaggtcatgttgtatagcaaacacactgccatcccactcctggaagcttctggatttacaagtgtagggcctcagtggtaataatgaacctttagacaatgtgctttcaaatccaccctattttgtttttatcaaatgtcagaatctctgttgctatttatgctatagaaaaatggctgaagcagcaggatgtgccatcagaggatcaacaagaccagtgccctcattatagctctgtcacagtcacctctaggtctttgttcctgtctgttaaataaggacattagacaagatgatctctaaaggcccttccagcttataggatcatgagtataacatctgatatgtaactggctataggaggccttttggaaagtcccccagttggagcctgggatgcacttgacacagcctgcattggacttcccctcttgtggggagtacacaggaggctctgaatatattttgaaccagttgttttgaaatttttatttctcattcaggaaacagcttgcagtttctttgtctgaaattatgcatactctacaaacacatatgtatatatgtttctatgcacatatatacacacaaatacatatataatgcatatgtaatgtgaattacatatcatatattctttattaaagtattaaggagaaatttggacatagtttcccaaataaggtagtcacttgggctcaatatcttggccatttaagcagcatgtctgtgcacacacataaacatacagtggtttttatgcaggctgtgggcaaaccctctgtcatctgccactatgttcaaatgagcttgttttccattagctcagtgttcacaacatgtgcacactgagacccatatctcaggcagagggcagtcagggacatgggcgaaaacacagcattgtaattgatagggataaaaggagaatggaaaataagaaagagtggaagcttcaaccagcctgagtcatttggtgtgtcatgattccaattttattgtgatcaaaatatggtctaaatgagtgatggcagtctccctttgggcatatcctaagagtatgcaaattgacttgcagtatttctaagcattctaagtaatagaaaacattatgtccttactttatgatcactaacgtgtctttatcaacagaaaacggttgtgaagataattgggaaaagaacgagcagtttggaagttgctaccaatttaatactcagacggctctttcttggaaagaagcttatgtttcatgtcagaatcaaggagctgatttactgagcatcaacagtgctgctgaattaacttaccttaaaggtagattttatttgcatgtgatagagcaaattggctaaaattgtaaaggtacttcttcttctgttttcatatccagatgtgtttctttgtatgtaacttttctgacctctcttgggatttaaacttctacactgaaacccataagcaaaaaagtactgaatgtaatcatatttcaccattgagaaatgtatcttgtgatggaaactaaagagagattgatgttcagaaaacaaggttgggtagcaagattaaactgctaccctaatcctaaatgaaaggattttcaaaaagcgaataattaaactctttgaacattgaaaaatagagaattaaaggaagggaaggaagatggttaagttacactagatggcctcagtaaacatccttacattgagtgaaagggtacagtcctcaggggcaaggagtgttttactaaatcttaaagtggatttaataacatggacacagaatgggtaggactttgttttgttttgtttgggggatggtagtggtaattttttaatttttaattatgaaaacttaatagataagaataaataaaaactttaaaagaccatttatcctatcataagaatttaagtatcaccttgttaatttcaataacaaaccctattggaactttgattggaattgtattgaatcatagattcattaaagaggaattggccaggtgcggtggctcacacctgcaatgccagcactttaaaaggtaaaggcaggaggattacttgaagccaggggtttgaaaccagcctgggcaaagtgagaccacgtctctacaaaaaaaaaaatttttttttaattggctgttggcatgtgcctgtagtcccagctgctctggagactgaggtagaaggattgcttgagcctgggagattgaagctgcagagagctatgatggcatcactgcactccagcctgagtgatagaggaagaccttgtcttaaaaaataaataaataaaaggtattgcagtttcaatattgtcttctcaaccatgaaaatgatatgcttttctatttatttaggacttcttttatgtactcagtaaaattctataactctttccatagtcttgtatatctttcaaaagaaactatataaacaaattttaatattatatttaaaaatcaaggaacctaagttactgagtccctgatgagttattctttgaatgaaagacaaataattgtaatatatgataatgatgatgtgccagacagactactaaatgctttttatacattatctcctttcatcccatctaactaccttatgaggtggacgttattgttatcctcattttgcagatgaggaatgcgaggctcagagaggaaacataacttgtccaaagtcacccacaagtatttagcagagcctaaatttgaagagtcagtttgacttgaaaacaaattgtatcacacatataaatggattcaccttttataagactgtaagttctttgcaggcagaaatgggtctcatgggttgtttttcacttttgcacaaagctgtaagctttattgctatatattaagcaaacatgtattgtctaagtaattcagatgcattctgtcacactattttataataactggaaatatttgataaatgcttactgtaagcaagccctactttctccagataaatccattaatcattactacaacctcatcaaacaaatgttttatcactagataaggaaattgatccttagaaataatatacccaacagcatacagctaagaagtatcagattgggatttgaatatcaacatatagaattgcagaactctatttatgtgaaagagggtctcaatatgttgcccaggctagtgtgcagtggatattcacaggtgtgatcagagcacactatagcctcaactcttgggctcaagcgatcttcccacctcagtcttccaagtagctaggactacaggagcacaggatcatgcccagcttttttgttatactacgtacccctcttagatatctttatctctttttatcattaaaaggccacaggtcttttgtcgctctttttgtttacagctttattcagacctcctttcttacttgtagctttacccttttcctgtattgtttggcacttgaatattcagatctttagaatgaaaatctgccaaataagccaaatgagctagtgtttggcattggagttctattccagacctcactgaagcctcagaaaaaatattgttgcgaatgaaaagtgccgataaattcaagtttcctagaatattgacatttggaaaccgatgacttcagtgaaggagaaaagtgccaaagtgtgacaatcaaatgttgcacgattctttatgcatcagttttctttaataactcatgaaagtaatgtaatatggtaaaggaccttattgtaccctactcctggccggacatgccccgtatttaatacatatcattaattttagaagtatatctgtttctaatgtttcaagttcctcttccagtgtgaaagcttcttaggcatatcaatacgcctaattatgactattggtttcccaagacccaagaaaactgtgttttaacctctaaaactctgctttctatctttctttcttttttcttttttttttttttttttgttgttgttgagacagagtcctgctctgccacctaggatggagtgcagtggcacaatatcggctcactgcaacctctgtctcctgggttcaagcaattcttctgcctcagcctcctgagtagctgggattacaggcacacgccaccacacctggctaatttttgtatttttagtagagacagggtttcaccgtgttggccaggctggtctcaaactcttgacttcaggtgatccacccgccttctatctttcttaattgctgatagcatctggtcatcaaataacaaatttgaatgatctatctccactgtaccacgtgtgtgtgtgtgtgtgtgtgtgtgtgtgtgtgtgtgtgactctcactctcattctgtatctctagtctaaacaggaccctttgggccctagagccataagccacatatatatatgttatattatatataatatatatatatattccattgtctatgaaacagctcctatacatatttctgacccagtcccagaaaaacttgatcatatggggatccatgtctgtctccttctactagattgaaattctcatgagggcaaggactttgtcatttcagtttttacatccctagaacctggcaaataatatgtgtgcctaatgaatttaaattgtcagtctagaatacagtcagatcttctgaatctagaagtacaatggaaactgcttttgataagtcttctatattaataaaagaggattaaaaatagatagtgagacagctactctaagaagcttctgtccttaccttagatgaaagggaatttgacaagctaataggagagcagaactgaattaacttatcagcctttgggtttctcaatagtctgaagatttttgtctattagcattgcctacctttgatgcataaacagccctctacagggattgctgccttacaatcaaggtctgcagatttgtttgttattagtagaataagtctaatttagataataacttaggcaactttgtcactttttaaaaattttttaattcttacagaaaaagaaggcattgctaagattttctggattggtttaaatcagctatactctgctagaggctgggaatggtcagaccacaaaccattaaactttctcaactgggatccaggtaactgctctttccctaccccctctgcacagaacaaatcttcaaaaaagcaaaagcttctcactcaccaatagcttagaaaagtttcacatcttggcagctcttactatggttacctctcagaagaattttttcttcctaaaccattcttaattgtggtactgttattgccaagctgaaccacaccatggacaactgagcatttgaacctctagacctttagaacaaccctacatttttatgtaagagcaaaatgagctccaccacatggcccaggagccattctatgtccctaaaggacttggcatgtctataactcacccatgctgtgtttcatctgcagctgaactctaatatggaattatccgctcgttttcaaactcttggggtctctccccactatagcacccaagtactgacaatataatggttgtattttataatacaaataaatacctcaaagaaagtcttttagggaataaaacaagcaaaatgccacttagccaaaaagcattcttcccaaaggaaggattagacaactttgaaaaataaaatcttaggcttatgacaaatgtagaacctaaagttaacactaatttcagtataaagctgcctgcacacatagtaggaaaactgagttaagagcaataaaattcaaattagccactttagttaatttagtttgctaaatttccttaccagcaaatgaagtaatacttttattatttcagtaaatagaatatttaaagataatttaatctttaactcaaggccttaatggcatgacaatgataaattaatatttttattttatggagtagcagattaagagctactaagcatagaatatggcctggaagtcatttgaggaaaaagtttggtttttgtttttaaaattaactacaacatatcatgatgttttccctttagattctatattttagaagaaagacatatttaagcacataattattcattgaggcttatacgtttcaatttagttaagttttaactataatatgagttcccataaaagcataaaattaggaatacaaattattctttctgacaccatcctggccctaactttctcattctaatgctttgaaaaatgttcccttttaagacaggcccagtgcacctactataggtggctccagctgtgcaagaatggatgctgagtctggtctgtggcagagcttttcctgtgaagctcaactgccctatgtctgcaggaaaccattaaataatacagtggagttaacaggtatctttctcacatactcatacaaatagacaaataggtcttaaaatcatagttttgtgaaaacaagtaaatcttttccaacatccgtttccacctttccttctcctgatactgacagtacagaaaagtacttgatttttaaccctgtggttagatattatcaaccatatatgaataaagctttatttgaggtaatgaagaatattaaatataaatatgtatgcgcccagaagaaggcagagatattcgagataggaaatatacttctgttcgtgtgtggctcttttttctccagagcagtggttctccaggggtggtccccagaccaacagcatcagcatcacctcttcctgttagaaatgcaagctctcaggacccaccccagatttgctacatcagaaactacaggatggggtccagcaatctgtattttaagaaactttccaggtggttctgatgcgtattcaagtctgagaaccactgcagttcatgcctccgtaatgaggcaaaacctatagacacaggagtaagcccaggcttctctaccttgtgccccacagcacccagccctcttctatccttctctgtcaggcaagtctttgcattgaaaaatcaagtaaaaaaggagaggtgcagagggacaaaatgtgtacaataagggggtttttccagggtgtttggggatgaaagtgacacaagaacagctgaagtttttgaggagtggaagggtgtgaggagtttttgaaagaatggagaagaggagtgtattgactgtcaagcacagggcctgatgtatacctggtatttaattacatcctcaccaaatgagagaaactaatactcaaagctggagggatgtattcatccgttttcatgctactgataaagacatacccaagactgggaagaaaaagaggtttaatggaccttacaatctcacgtggctggggaggtctcacaatcatggccgaaggcaaggaggagcaagtcacatcttacatgaatggtggcaggcaaagaaagagagcttgtgaaggaaaactccgccttataaaaccgccagatctcatgagacttattcgctatcacgagaacagcagggagagacctgcccccatgattcaattacctttcaccaggtccctcccataacacatgggaatttaaggtgagatttgggtgaggacacagccaaaccatatcaaggggaaaggatgatttttaaatgtcctgctttaaggaactgtgagtgaagggaataaagcattcaaatgtcttgtcatctaaaaaggagtatagagcaatttttaaggaaaaactagatataaaataaagaatctgaggggatattttaagataataggggaaatgaacatttgtcttccaagttgattcaaaccaaatttagtccatacaacaaaaggcataatagaaaagccagcacaaatgaaaataaactagagcaattgatgatagattaagtaaataccttgcagtagcaattattaaataaatcatgatgtttccacatgattgaataatatgcatttactaaaataactgtgccagcaggaaaatacaaagaacaaaaccaaatgatatgcctacttatcattttaatcttgtaaaaatatgtattcattgagacaaagactagaatatgaaaatgattgcattaagttccattatgggtgatatttttcctctgttcctttatcataattataaaatataacaataatacatgctatttcagaatattaaagttaattgagttatctcgcaagtgtaagaggctagctgaatctgaatcactttatcctttagtaaaaaaaacaaactgtccacatttttttttctttttttttttaattatactttaagttttagggtacatgtgcacattgtgcaggttagttacatatgtatacgtgtgccatgctggtgcgctgcacccactaactcgtcatctagcattaggtatatctcccaatgctatccctcccccctccccctccccccaccccacaacagtccccagagatgctgtgttttcttacaacaaatattccaaatggttctaaatcagtgaagtctgagtaaccaactcactttctggttttgttaacggggatagaagtattctgtggggtttcatacttcattctttttttctaatctggaaagattagaccttcgattgtgagctttctcatggtcaaaacagaatcactaattccatgaggaccatctgtctagcagaggggaggaaagaagtccaggggtaacctttgccctctcatctcttggatgcgaagtgtataaatgtcttattctgtcccttaaatctctgcctgtcctttgttcaacggtgagcgttaatctacatccccttgctaagctggccatacaagaaaaggaggcttgccctcttataatcttctcaaggacagagactggagggaaacctaacaaattccatatccaggaaaaaatttgtcagaaaatgacttaaggcacatctttctactgtctacttggactaagggcaatctcccttgactgtgtccaagcccttaatagtctgtgctcagccatatagcacattgaagcatgttaaagtcacatcattttctgaatcccagcgggaattcctatgatgctatatatacctcatttatgtggtaggcaccacatgaattcatgtcaccgtagcatctgacatcacgtccccagttttccaggactctcattattcaagaaaaaagaatttgcaatgttattgattcacaatagatgtatctttactggaatataaatagctgcttttcccccagatgtctggacatactcagatacccgctgtgatgcaggctggctgccaaataatggattttgctatctgctggtaaatgaaagtaattcctgggataaggcacatgcgaaatgcaaagccttcagtagtgacctaatcagcattcattctctagcagatgtggaggtggttgtcacaaaactccataatgagggtaagtttttaaaaataccctatttgagaggcttaagccattttaaagtatccctggttttagactctttgtgggaatgaaaagcttacagtttgatcccacagatcagccctgtcagataggattgtctctggtgatggaactgttctacaattggtctagtatggtggtcactagcaacatgcagcttctgagcagttggcatgtagccagggcaactgaggaactgaattattacttttatttcatcttaattaatttaagtggccgcatgtgcctagtggcaaccaatttgacagtactgccattgattgatttccctcttctcatgagctaaattctatttaagttgctcaaaaaacttaagtgataattacttcacttttgtaattatttgaaagctaaagactggtaaaggaaaatatactagacggacagtattatgatctcttcctagaatagaactcttagctagaatagctaagagtaggtacctactcagtgccagcctggtgctccttgtttcacttgtgaaggcagcagagtcataccagggcagcagtggacagtatttctattcaaattgggatatgtatgattgtatttatagaatttcattcaccccacaaagcaaagtttatctacaccagatatcaggaacacccagcctgcagatgttctacctgtgtactttacttgcataagttacttgaaaagccttcattacccaacctgcctgtcgtatcaacatattaataaccgaattaagaatactacaaaggctcttaaaactccatatcagaatataaaaatttgtataacaatgtacatattacagtatttaattgagcaaaaccaaacaaataatacatttttcttttagatatcaaagaagaagtgtggataggccttaagaacataaacataccaactttatttcagtggtcagatggtactgaagttactctaacatattgggatgagaatgagccaaatgttccctacaataagacgcccaactgtgtttcctacttaggagaggtacgaaacctcctgtggtttctttatattcttcctgttttacctaatgataatattaagacttctttggttgggaagtttgcgtataagctggaaaataaaaggtaagagcactctggatcagggtacagagccacggaccattacctgttaagaattgggccgcacagcaggaggtgagcggcgggtaagcaagcattactgcctgaactccgcctcctgtcagattggcagcagcattagattctcctaggagggtgaaccctattatgaactgcacatgcaagggatctaggttgcacttccttgtggaacagtttcatcccaaaactatcctcttccccaccctctgtggaaaaaattgtcttccacaaaactggtccctggtgtcaaaggttggcaacaaataatctaaagtctagactgtctttctggtagctactttaaaaaggtaaataaaagcaattactaaataagcaacccatatcctatctgagagcatcttttctggtctcaaacagatacagagaatccctttagaactcacattcttgtgctgactgattctagcaacctgctttctctcaggaccagggcctgcacccacctttctgccatcagtgtgatattcggcagatagccacaatttaacctgaaaaatcccatcttccaaattcatgttcagattgttttatatcgatactactttgagaagtaaaaaaatggttttatttaaaaactaggcctaacatttttcagaaaccaccttactcctatagaatgcttaaacattttttgaacatcttttacttaataatccaaaataggctgtgtcttgagcagaaaagatatatgtacctctacgttttgtttgtatcactttcctgtggacccctaattggttatgaaagtgactgtgtcactcagacatctaaagagacttaagtggaagcaataaatattatgtgtatttaaaagaagtttagaaaggtgtcacatttgatgctctatttaaaaggacatccaacatgtctttagaagaacatcagaaatggaaaagtgttcccatgggcaagagtgaattgatggcatacctagacagcattccaatgttcaaaactgacccttatcacaatcgacttattagaatttaattcaaacaaagcaaagtgacgtagtcaattaagcaaattaatgttaagtagcatatatgaaagagagaattttgaagtccagattgaagtagagttgaaagaaacttttgacctagaattcatggagaatagctattttagccaccatcatcattttacacgtgaggaaaccgagaaagggaggttgatgatgtacctaaaagtttcaaactttggctatgccattctagtctagaagactagaatgctggaactgtgggctgagttcttctctcttcaacttttatactaagtgtgctttgatggttttattgctactcttataagaaaatgaaatttatccacactgtgacctggaggtgatgctgaggtaactggctgtgagccatcactttgcaggcctgttgagtagcattttctaggagtgtgttctcacatttgataattcacttatattcatttctctctctctgtctctgtcatagtttttgtgagttcagttctgaatatgcggtaaataatttcctttccaagcaaatgtttttgtctcctttcaaagctaggtcagtggaaagtccaatcatgtgaggagaaactaaaatatgtatgcaagagaaagggagaaaaactgaatgacgcaagttctgataagatgtgtcctccagatgaggtaggtaaaatccctatgtaaattttctcaagcagtattacaacttcttggttagaaatggtagctgagacttaaataactcagacttataaaatagaggaaactactagcttctgttcatttaagttagaacaagccagaaggcagtgagtcatagcatattggccttcttacagaagcagaaacttgaaaatttctataaatatttgtagaattactatcctcaaggctgatgtctttacttcccccactaatatcaatattcaaaaataattcatccagtgaatattatactcttatgatgagccagccacccatatgagaagtaacccatactttttgtctgacacaggcccacagtcttgtggaggttatctgtgaaattgcatcccaccctcatcacatgtatgatttcaatagccatgtcctcaatttccacaagttctaagacgttatcaatgtagcagaaacatgcttgccagacgggacaccatcaagtctggaaaagagtttgacaatatttttcctctgacttagggctggaagagacatggagaaacctgttacaagatttatgaggatgaggtcccttttggaacaaactgcaatctgactatcactagcaggtgtgaccatcagtaaacttgtactcataaactttcaactctgaattcttttgccaaacagtcttcctaagtaaaaggtgcatcttcaaatagagtcaatcattgtgaaacacttgccaatttgattctccttttgtagatttgagcaagaatacctaaatgatttgatgaaaaagtatgataaatctctaagaaaatacttctggactggcctgagagatgtagattcttgtggagagtataactgggcaactgttggtggaagaaggcgggctgtaaccttttccaactggaattttcttgagccaggtgagtgtcttaatctttgaagtagtagtatactgtgactagtgaaaggcagcactcctcccaaagatgttcctcacttacttttgaaatgtgagggacatgatgatcttcaggattggagtctatctatggaaccataaatagaagcagtggctatgtcttccctattatgtccttgggaataatccaatgaaagaaattcaaaaacttagttctcccaaaccaccatctaatggctcagagctagaagcaccagtgtgagtttttaaaatcttttccatgtaaatctcaaatagaatctagaagctcccgtgtgaggctctttacattttcatctctctgcttcttaacctattttcaaaactgaatgtgttttcttccattattctcaatgggtaagaattatggaggctatcttgtattatttattttgtttttgtttttgtttttgttttgagatggggtctcactctgttgcccaggctggaatgcagtggtgtgatctcggctcactgcaacctctgcctcccaggttcaagtgattcttctgcctcagcctcccaagtagctgggattacaggtgcatgccaacatgcccagctactttttgtatttctgtagagatggggttttaacatgttggccaggctggtctcgatctcctgaccccaagtaatccatctgcctcagcctcccaaagtgctgggattacaggtgtgagccactgtgcctggcttcttatttattttgaaagttatttcctctttctccaaccagcctaaagcattgaccataatttgccatagaatcagaacacttaagccggaaaggacctcagaaatacttttagagttaagaaaacagagactttaaaaggtgatttacttgacaaagatcatctggttattgaattaatgaaatccagagttcctgatttttaagccagtggctttgaataagacagcagtataaagcattctacttttcaccctgtgaattatttatattttattgtgttggtctaatgtgatcatgaagactattttttataacacagagattggaaaatatgagcttacaattgaacatgttatttgaaatagaaaatgcccacaaaagttaggacacatggtcatcaccatcaacatgagtgatgttgctagtaacaaagtcatccttttatgtctgaaaaagatagagtatacagatgttgatcctggttaaatctcagattaagaacactctaatggataaagcacatagatttctttttttctttttcttttttctttttttttttttttttttttttttgagatggagtttcgctcctcttgcccaggctggagtgcaatggctcgatctcggctcactgtaacctctgcctcccgtgtacaaacaattctcctgcctcagcctcccaagtagctgggattacaggcacctgccaccatgcccagctaattttttttgtatttttagtagagacggagtttcaccattttggccaggctggtctcgaactcctgacctcaggtgatctacccacctcagcctccgaaagtgctgggattacaggcgtgagccaccgtgcctggccagatttgttttatagacactaagagtaaaggtgacgttcttgataactaagtcttggtggttggagaggtgcttgggaagtagctaccatgactacttcctccattctatgaccagaaaggctatgtgaagctctctttaccattattgcacccatcctcagccaacttggtctatcatgggcacaccgtggatagaaggactgaacagggaaaaatagcacacccattcagggtagcaaggcaattatttttcccagtttcttattcctcttgctgtttgtgtatatgagactatgtggcttctctgtttggtgggatagaagttgtcctattacttttcagtatatgtaactcttcttgtcttttacctgcttcaggcagtgtgatgtaatggaaaatggaacatgatgttttgtcagacaaatctggtttcaaccccaactctaccattcactaactctgactgtgggcaagttacttagtcttcatttacaaaatggaactgataattcaaactaccttttaatactgttatgaatacataaaattatgactgtcataaaattaacggtaaacaaatgtatgttaccacatacctccttctacctttattgtaccagcttttcctttggatcagaatctgggagagttgtgttttgaggttaactaagtttcttaaaaactgctcaaagtttttaagctaatttgaaccactatcctaagcagcagtagtatttagggtacagctctagaaacagaccacctgggcacaaatcctggggcaaccacttactaattctatgaccttgaacaagtcacttcattctcactgtacctcaaattatgacaatagaatccccccataggtttgttatgaggattaatctttttcaaaaagtactttacaaataataaacacctgtcattattattctgaacaacatatttctttcctctctttgttccattttttttttattctctctccccaacttggctgaagtaaagagtagaaacactagaaaatgtttgaactttaacgttttaatttttaattgagctttccacttcaatcccagcttccccgggcggctgcgtggctatgtctactggaaagtctgttggaaagtgggaggtgaaggactgcagaagcttcaaagcactttcaatttgcaagaaaatgagtggaccccttgggcctgaagaagcatcccctaagcctgatgacccctgtcctgaaggctggcagagtttccccgcaagtctttcttgttataaggtaaagtgacattctcattctatccttcaatgaagttatttttccactacccttgttcatgtccttgtacaaattatgctcttctccatagtactatgtaacctaactaaagtgctctggagcacagagtccttggcagggcatcgctgaacctctggtgtgaggtgcctcagccccacaccctgcacgtgtcctacctgaaagggcaggcccaaagccagaagtggctccaccccaaggtctttttttcccagtaagttggtgtactatatgccatactgccactatgcctatgatcctcatattcctctaattcttgttgtcaaattaacagctccagcactcctaataatgtaaaaaaagtgtatatatatttacacttttacaaacatatatatatttgtgtgtatatatacaaatatatatatttatatatacaatatatatatttataaacatatttacaatatatatattataaatatatttataaatatatttacaatatatatatttataaatatatttataaaatatatatgtttatatatttacaaaatatatatgtatatatatttacaaaatatatatatatttacatatatttacaaaatatatatatttacataaatttacaaaatatatatatttacatatatttacaaaatatatatatttacatatatttacaaaatatatatatttacatatatttacaaaatatatatatttacatatatttacaaaatatatatatttacatatatttacaaaatatatatatatttacaaaatatatatatttacatatatttactatatatatatttacaaaatatatatatttatatatatttacaaaatatgtacatatttatatagatttacaaaatatgtacatatttatatagatttacaaaatatgtacatatttatatagatttacaaaatatgtacatatttatatagatttacaaaatatgtatatatttatatagatttacaaaatatgtatatatttatatagatttacaaaatatgtatatatttatatagatttacaaaatatgtatatatttatatagatttacaaaatatgtatatatttatatagatttacaaaacatatatatatttatatatttacaaaacatatatttacaatatatttatatatatttacaatatatatatttacaatatatatatttacaatatatttatatatatttactatatatatttacaatatatttatatatatttacaatatatatacgtttatatatatttacaaaatatatatacgtttatatatttacaaaatatatatacgtttatatatttacaaaatatatacgtttatatatttttacaaaatatatacgtttatatgtatttttacaaaatatatacgtttatatgtatttttacaaaatatatacgtttatatgtatttttacaaaatatatacgtttatatgtatttttacaaaatatatacgtttatatgtatttttacaaaatatatacgtttatatgtatttttacaaaatatatacgtttatatgtatttttacaaaatatatacgtttatatgtatttttacaaaatatatacgtttatatgtatttttactatatgtatatatttatgtatatttttacaaaatgtatatatttatgtatatttttacaaaatgtatatatttatgtgtatttttattatatgtatatatatttatatatatatttggtctgcatcagtcagctagttccataaacaaaccactagatgccatcccaaaattcggtggctatgacaacaaacatttagcctcacattctcacagatcttcaggccagctagagtttgactgatctagtttgggcttgaatggtgacctctgctcccaacttcaggtcagctgtgctgggctccagcccttccttctagagctcaggctaaaagggcaacagctcacaggggtttgttgttctcatggtatatcactggagcccaagaaggcaagccaaccatataagcacatttcaggcctctgctcagtttaccttcactaatatcccatcaacacagtaagtcatatggccaagccccatgccaaggtacaaagacgtatactccgcccaccagggggctgtggcaagaccatctaattatattacaaggaactgaagaattgggacaaatataattcatcctgtcattgtgtcatcatctcttcttcctcctctgcctcctcctcctcctctttttcttctttcttctttcttctttcttcttctttctttttctcctttcttcttcttttgaaacagcccaagttccaggtttacttttgccactttctgtcaatattcacacaccagtgcagactgctctttggttgttcctcgtcagaaaatagtgctatttttgtgtgggtcactgtgtcttatattcgaaatttctattgttagcacatttctttgccaaaggctactcccaaagcatttatatgtatcctttacagccttgcctcctggttcattttatctttcaaggtcctaggaatacaggagaacgtggatcttgttggaatagttccccagcctggctgaggaaggccatccatctgaccacaaggactggcatctgtgctggcctttagttgaattgacactttcagcaggacctgtctgtgtctcagtatatgtgcatttacctatgccttcactacacctttaagaattcatttcaggggcccacacatgtgacagtaattgactttagcactatgaaatactttatgataataccataaaacaaattaatattatattttgctaaggtattccatgcagaaagaattgtaagaaagaggaactgggaagaagctgaacgattctgccaagcccttggagcacacctttctagcttcagccatgtggatgaaataaaggaatttcttcactttttaacggaccagttcaggtaatactttaagaatgagaatttctatgctgaatttgatgtcctctagatattcaaaattgacatgttcttaccctcactctctgttggaaaaaaaatggacatgttttattatctaaaaggtcatttggtgcttagcagtcatggaacattaagcactcttaatgtgcagacactatgaggaatctaaaaatgaatgagatgtattccctaccctttgtttaataaagtccaacagcaatgtatggcagaaaatctagaatataggcaaggaagggccttgggaattcagaggagggagggagtgtttctgggagtataatcaggaaaaatgtcataaagaaggctgattcttggaaggtaggtattatttcaaaaggcaagataggagaaggagaaggagccagaaaaaaaacagaacataagcaaaggaactaagaccagaatatacagatatggtcaaggagaaatgagtcatacaaattagctagaaaatggaatttggatatgaaattggaatgtccttgtttgcaagggaaggagtttgatcttaagtaattaaacacaaccaaacaaaaaacaaaaacaaggtgcgtgtgtgtgtatttatatctacacacactcacatatacctgcatatatacatatatacacagagaggaaggggttggccaggctggtctcgaacttctgacctcaggtgatctgcccacctcagcctcccaaagtactgggattacaggcattagccaccacacccagcccattatcagttttgattaagtgtgagtctgcaaatttgttcaataataataaagtccaattctgcacttttgaaagagacttaaaacaaagcttgccaattagtacttatccagctctaagactataatgttcttttcctgggaggaaggggccacaaaatactacaaaattgtgaaattctaataaaaatccttaaaaatttaaaaattttttaaattttttaattttaaaaattaaagcaactagcaacattttcattgtgcaacagataaaagttagtgctgagtagctggtggcctcctgaaatggggcctgactctccaatttgccaggtctctaatttattacttcttgaccccacttcacttgcttatgttatgtgcttgtcttatatttactcaaatagcaattgagttaataatcacaagtcatgtgatcatcttaataggtactgaaaatgcattgggtaaaatccactattcattcctggtttaatacataaatatacacttatatttagtaaatataactaatatgtaaattcttatttgaatagaagaatagctcaaattaatagccatatcacacttaatgatgaagcattgttaagtgcatttccctgaaagtcagaaaaaggtaagtatccctatatcatcactattgttaatcttggtttgaaattcaactcctgcacattaagataaaaacaatactataatgtgtaaatgtttatatatattaagcagaggaaaagacagattatcaaagagtaaaaaatatactatttacatttaaaactagactgcaaaaagggtaatggctattatatctctaggaagtaagattttgagtgatttttaaagtcttttctatgggctgggtgtggtggcttatgcctgtaatcccagcactttgggggcctgaggtgagaggattgcttgaaaccaggagttcgagaccagcctgggtagcatagggagaccctatctctatttaaaaaaaaaaaaaaaagaattagctgggcatggtggcacacacctgtagtcctggttactcaggaggctgagtcaggaggatcacttgagcccaggagttcaaggatacagtgagacaagatagtgccactgcactccagcttgggcaacagagtgagatgctgtctgtaaaaaataaatgaatagaatgttttctttgaaaatttctatattttccagatttgctttttgttttgttttttgagacagtcttgttttgtcactcaggctgaggtacagtggcatgattacagctcactgcagcctcaacctcccagactcaggtaatccccccacttcagcctcccaagtagctgggactacaatcacatgccaccacacccagctaatgtttgtatttttttgtagaaacgggtttttccatgttgcccaggctaatctcagattcctggctcaagcgattcaccttccttggcctcccaaggtgctgggatcacagatgtgagccacagtgcctggcccagatttgctctaatatagcttctgctgtgtttttctcattagagaatgtagtttcactacagtgtactgggaatctaatgcaaaatatgatacctgtgttccataaatatttatttattaagcatctatcgtagaatctcaggtattctagacatcattgtccagtgttagaaattaatatacaaaatttcactgcagactgacccaaggcaatttgtatatactaaatactaactcttgggttctttgtgaggtgagtgttagctattccctcaaccttgagaatagattataacaaatgcaaaattcagaccaaaattttccacacatacagacatttgctatgcaaacattcattgaagcagacacaaaacattttatacaacgtgttttgtaagcttgacaacattccagcaatctgtcctttttggtgttttaactatcaccttgcacagatttacttgaagcagatgtggcagtgttctgtggcagcattctgttcccattgtagtgagtatcaggccatcacaatcacctgacccaatgactggatgtggggttgtttcgaatcaagccctactaagatacaggctgcggcctcgcaagattctaatacactcttgagaagtgtgagagtttctctaaatattttagctaatccctgcatctcaaataacttatatttcaccagtgagagcccaatcctaccatcatgctgatgaacaagcttccgatttcactgacattaacccagttctcacattcattctgctcatgaccaaagcctccagtgtgactttggtgatcatggaagtcctcatggtggccacctctggaccatggcctttctttttcttttttttttttattattatactttaagttctagggtacatgtgcacaacatgctggtttgttacgtatgtatacatgtgccatgttggtttgctgcacccattagctcgtcatttacattaggtatttctcctaatgctatccctcccccatcactctgccccacaacaggtcccggtgtgtgatgttccccgccctgtgtccaagtgttctcattgttcaattcccacctgtgagtgagaacatgcggtgtttggttttctgtccttgcgatagtttgctcagaatgatggtttccagcttcatccgtgtccctacaaaggacatgaactcatccttttttatggctgcatagtattccatggtgtatatgtgtggggcatggcctttcaaatacaccaccaatacttcctgacatgtaagtttcaagcagggcaacttaatggcccttagatttcaagcttgacacacacaatatcatattatccagataaagtatttttaagtaaaatgctgacataagctctagattccaagcaagaggttagtaactctaactggaacgaggagccatggataagtactaatgaatgaggttgtagatatttgtgagaaacaataagtagaaaacattggaatatcatatgtgatagaaatgaccattaagagcatccatatacagaacgaattacactaggaaacaaaacatgaaaggaaatttttatgatttgtttctttgttttgaatcacacttgttgagcactcccttctttaaaaaattaatacaagttcattatataaaatttggaaaatataaaaatgagtaatgaagcaaacaatcacctcaaatcctagctcctgattataaacatagtaaacccttagtgtaaaccctttctgtttacttacatctctacacatttagcttttacaaaacctattttccatagaatgtactatgtttaatttttttctaatcataaaagtaatgcacattgaatttagaaaacagaacagcacagagaaaaaacaaatctccttaatcccttcacttataggaactgtattttatttgtactctgatcctagcagttaacacaatgccatggtaagcagactgctttgtttgcttaataacttctccataataaagaaattgtttgcctgtgctgtgcttagagaacatattctaaaaccaaaattgtaaccatggcttaaaggaaagaaggaagcaaacccatttatattagaaaatgattctaaagcatactccttgaatgccttggctttttattgcaggaattgacctttctcagcaagatatccattgcccaaattgtgtattgcatgccaaggagttaagtcagattactgctgtacctctcacaatctaagttccacatctctatttgtatttcagtgaaaaggattcatggtgcaccaaatcattaaggctctgagatctttgcaactcttaatggcagcccaacagggacagccactgtagggcaaaaatagccataggattagagaagaaagccttgtttgcaatgccattgctgctgtgtacactaccccctgtgatgtggcaagaatggatttagacataaatctaaggctttgtagaataagcaccctcatcaaatagtatttattggggcttatggctgagatactgttttccttagcaaccaaatgcagcaggaaatttgattgagaataggaattttaacacaattacacatattaaccttttacgctatctcttcttaacccaatagttttaaaaccatatacttagtgcttggagtaccaggaacttataaagagagagagggaatctcagtttgacttgattccccagttatgatcaggtgcaattttttccttcacattttctaaaatcaacattggaagtgtgcaatgatcaatgtgatatccaatttcttcttccctttatctgcctacagctaaactaggccaaaccaggaatgagttacaattgaggaaatattttccacttctgatcccgcacaaaaaaaatacatacatgtcgctattattttctgtatttatgacatgctagtgagttctttaaaatgaagctgaaatctgtaaatttctgtgttcaaatgaaacttttttcaatctgtaaatttctgtgttcaaatgaaacatttctgaaatacagtttcagaaagtagtggagattagaaattttggacaatcgagcaaactcttttctgtaggaagctgtcctctgaggtgcagcaaaggagccagaaatgggcttgaaagcagagatgtttctaagtggaaggaaggggagctattagctgagagaagactgggtaagggcttgaggagcctagaaagttgaggatgaacctctaaaaaggctaccagtgggagcctctacaatgcaggtgacaaatgatctttgatcgtcttcctggttgtattgtggattgtgtaaagaagataaaatagctaatgcttactttagggaaacacaaaattctacacgaattccccaggcccaaatatataatgtgcaaagatttgggagaaatgcagttatttccccaagtaaatatgaggaagaaaacttaactgcctctctattttagccgtctggctttaattgtgctgtgtatgccaattgtctagaccctgtggtttagaaatccagcactcgggcagtatgatacactcggaagcctgtaagagagctccgatgagctgaaggcataaactgcaaattcctcttgtagctactaaatttaaactggatttaattgtctccactggatatatcttaggtccacaaattggtggatctgtctctatgaaagaaaacaagataacaataaaaaccaaaacaggacagtcctcattcatattccattgcattaagtccaaaagccttgaggttgaaaagatgaaaaagtacttattgttgttaaaatatgagggaatgttgaacaaaggtaagaaataaagaaaagcaattatttattaaaaaataagaaatcagtttaaaattctttgtttcagcctttgattcactagtacattttattaaaatgcacttatatttctctgtagacttgtagctatatgttccatatattctgctgaacttgagagtatgcattgtttttagatttggaatctaccccttctctaaaatgtatctgtattacacttacaggcatattacatttatatatatgtatacacacatatgtactgatcatacataccatgtaccaacaaaaggttaaattatgtggaatattattggtcgcctaaaagtgtaataaattttagaaaacattttcaaatggagttagaggcagagaaaattttctgtgcttatattacatctacttatgctggatatttatccctggccagagcataaatgtatttgaggggaaaggattacttagacatatgttcctgcctccatattgcttgtgtagatagtcttccttggaaggcctacccttcttcctcttggccaatctgaatactggcattcagatcatgactagaaagaaatgttagccatcccttgaagaatatcttttgtcctaccaacctcacaaagtctttcttcattttctgcagtccgcagtgacctctcctttctctgaacttttgtgtcacctaaaatgtatataactcatttgatagctttcataaatggtctttacttttttgttcatatatatcttatctctctatttcatattacatttcagggtagatgtaggtcttatacttctctgtgtcatcattgcacctagctcaatgccttttacataaaagtataatacttataggtgataagtataatcacttaaattattgcttaatttatttttctggtatatttctttggcacataggcaatactcaaatgcttgtttaaacttagtggatagtaggaactcaactatgtttcaaatattgtttaacaaaaatttagccaaatagttctgcattttaaagaagaatatttgatagtgttatagacaaacactttaaagaaatgccattgttgcctttgactgtatctgaaagtattgtttaatattcaagcactacagtaaaagtcttggaataatttccatttttttcctcttaaaattcaaagtagaatggtttttgcctttcatatgaagaaaacagcttaatatgtagttttaaaagtatggtactttttctgtaactaccccacattaagggcttagtttcatttcaaaagacttctttatgttgcttgaaactgtgcttttcaattagtgatgcacattagacatgtgagtgctaaatatttttgccaagcattgtcctgtatttttaacacttgctttttacatagtggccagcattggctgtggattggtttgaataaaaggagcccagatttacaaggatcctggcaatggagtgatcgtacaccagtaagttaaaacgttattgttttaggtagtatggaaacactgtttgtttcaataacaagttgattgttaaataatacattgacacctaaaatttatatggaaccacaaaagaccctgaatagccaaagaaatcttgagcaaaaagaataaagctggaggccatcacactacctgagcttgaagatacacctcaaagctatagtaaccaaaacagcatggtactggcataaaaacagacacttagaccaacggaacagaatagagaggccaaaaatacatccatatatttatagccaactggttttcaacaaagataccaagagcacacaatgagaaaaggacagtctcttctataaatgatagtaggaaaactggatttccacatgcagaaaaatgagattaaacccttatctcataccatatacaaaaatcaactccaaatgaattaaagccctaaatggtaggccccaaactatgaaactactaggagaaaacacagggggaaagctccatgacattggtctggacaaggatttttttggatacgaactcaaaaacacagacaacaaaaaccaaaatagacaaatgggattacatcagactaaaaagcttctgcacaataaaggaaacaatcaacagagtgaagagacaacccacagaataagagaaaatatttgcaaattatcatctgattaaaggttaatatccaaaatacagtcgtacatcacttaacaatgggatacattttgagaaatgcattgttagttaggcagtgtttttgtgcaaacatcatagaacatacttaaacaaatctagatggtacagcctacttcacacataggctacacatctaggctttatattgctcctaggctacaaacctgttgaacatgttactgtactgactactatagggatttgtaacacaatgataacatagaaaaggtacagtaaagatataatctcgtgggaacacatcttcaagggatggctaacatttctttctagccatgatctgaatgccagtattcacactggccaagaggaggaaggataggccttccaaggaagactatctacacaagcatatggaggcaggaacatacatgtaggccatctgtggttgactgaaaggccattatgcaatgcatgactgtagataaggaactcaaacaactcaatagcaagaaaacaatctgattttaaaatggccaaatgactgaatagacatttctcaaaagaagacatacagatggccaacagtcataggaaaaaatgctcaacatcactaatcatcagggaaatgcacattaaaaccatagtaagttatcacctcccacctctcagaatgattattataaaaaagacaaaagatacatgttggtaaggatgtggagaagagggagcttttgcacactgttggtgggaatgtaaattagtacaaccattattgaaaacactatgaaggtccctcaaaaaattaaaaatagaactaaccacatgaacagcaatcccactactgggcatatattcagaggaagtgaaatgagaatgtttaagatactcggagggtgactgcagcactattcatggtagccaagataggaaatcaacctaagtgtccatcaacagatgaatggatgaagcaagtatggtacatgtacacaatggagtactactcagccataaaagggaaggaaatcctgccgtttgtgacaacatgggtgaccctggaggacattatgttaaatgaaagaagccaggcacagaaagacaaatgccacgtgatatcactgagatgtggaatttaaaaaaaaaaaaaaaggatctcatagagctaaagaatagaatggtggtttccaagagctggggcagatgaggtgggggactggggagatgttggtcaaaggatacaaaatttcatttagataggaagaataagttcaagagatctattgtacaacaagttggttatagttaatattttatattcttgaaaaatgctaaaagtagatgttaagtgttctcaccacagaaataactgtgtgagataatgcatttgttaattagctaaatttagtcagtccacaatgtatatatacttcaaaacatcatgttgtatatgataaatgcatatacttttatctgccaatttaaaaaataaaataaatacattcacgtatcatacaaccattaaaattatgtgtctttattgaaatgaaaatagagtctcatataggcagtaaggaaaagacaagttacaagtcttctttttatttttaaaaacccatatgtatagtctctctatatatagtcaaaaaattgtaaagctataaatatagtagtcatctttgggtagtatgagtgatttttttctttttgaaatggggtcttactctgccacccagggtgaagtgcagtgctgcgatctcaactcactacaaccttcacctcccaggctcaagcgatcttcccacctagcctccccagtagctgagaccacagatgcatgccatcacgcccggctaattttttttttttttttttgagacgtagtctcactctgtcgcccaggctagagtgcagtcgtgcaatctctgctcactgcaagctccgcctcccgggttcacaccattctcctgcctcagcctcctgagtggctgggacttcaggcatgtgccaccacgcccaactaattttttagtagagatggggtttcaccatattggccagggtgatctctaactcctgaccctgtgatccacccgcctcagcctcccaaagtgctgggattacaggtgtgagctaccgtgcccttccacgcccagctaattcttatatttttttgtagagatagggtttcaccatgttgcccaggctggtctcaaactcctgagctcaggcagtctacccatcttagcctcccaaagtgttggaattacaggtgtgagccacatctggccacaagtgattgttttcaaagctttctctttatactgtttattttcatttttatagtaagaagcttttctttttattatctaaatatggaagagttatacaaaaaataaaatatctttttctggggggactaggtggggatgacagagtctcactgtgtcacccaggctagaatacagtggtgccagtatgactcactgcagcctcaacctcctgggttcaattgatcctcatgtctcagcctctcaagtacaggcacatgccaccacatccagctaatttttgtattttttgtagagatggggtttcaccatgttgcccaggctggtctcgaattcctgggctcaagccatctgccaaccttggcctcccaaagtgctgggattaccagcatgagtcactgtgcctggccaaaagtatccttattggaggaaattatttgtttggagaaacctctagaaaatccttgctattattccacatttatattataaggatatattagtgtaatagttataggagcaaaattattctcagatattcaatatttactccaatttttgtcaccaaaaattggtgactccaatgtcacctccttttttattctttctaaatgtaaaactccttgagtttattttcaaattggagcatatctgagattagttaatcaaataatgagcatttcaacacatgcaaaaaaagaaaaaagtattttgcaaacctgattctctatgactccagcggcgaacttaatacactattaacttccacttctgaaactgtggcttcctttgtttggaaacttatgacattatgacatttgctaagtcctctcatgatttagcatcatgatataaaaaagagatggaaaagttttctttctgtggcatatcaacgcacttgagtgattaaggctgcctaaattacatctaaattgcaaatatttatacatcagtcttaaattctcaagcctctcttgtcttttcaggtgtctactattatcatgccaaatgagtttcagcaggattatgacatcagagactgtgctgctgtcaaggtcagtacaatgctggaaaatctgcatatttaaaacataagtccatcatcatatgcagtcaagtaacagatccatggagtgtctttttatgtgaagcatgatgttagatgcagtgagagataagcacacccatggcctggccctcagcagcctaacttacacttcatttgagaggataaaattcatattcaagaaaacctctctcattaccacgcagtaatatgctccaaatgagggggctgaggaaggctaatgaaattcagaggagaaagtgagtcccatggccatttcccaggaagaggtgggacttgaactgggactttaaggatggatagagtttctacaaatgggatagggtaaggttttttcatgaggggatggtatgagaaagtggtataaaataaggtggaagtggaagagggcagtggagaacagaatacagatcaagaagtttcattggtgctgtccttgataacagtattaggaaatcagattgatgccactttaaggaatttctacacttcttgataggcaacagggcattttttaaagtttctgagtagggagggtcacatgaactaaggagggtatgaggaagattcatcttgagacagatgtcaaaagcaacaggtaagattggaaggcatagaagaccagtgaggcatcttcctttgcagaatgcattcatgtatccatttcataaacagtccaaggagtcagtgaggcactgggtgatagaacaatgacaaggtacaaagcatagccattgtcttcacaaaactaaagtctagtaggaaataaagacaagtaaacaagcaattacaacaccactgagtaaagactatgacatgcgaaatacaagttttatgcaagaacaagaatattatgaaagaataataaggatggtgatggtgatggtccatggtggtggtgatgatgatgatggagcagctaacactgattaactcctttatgagccagccactatactaggcatgtcacatatgtcacatagcacataagcaatcttgtgaggtaggcactgttactgtattcatctcacatggaaatttgagctgtgagtaatttaccccagcttacatggagtaaatttaaactgaaagaactgaaatttacacccatgtgtgtctgggtctggtactcttaaccactatgctatatgactaggcatttatagaaatagaaagggtattgatttatgagaaaattgtatgttttagttcagatattttgaatccaagctagctataagatgtatgctatggtaagttgagatcaagagtcttgagttgaaaggaaaatgtatatttttaaaaaaagggccaagaagtggatttggaggaactgccaatatatagagtgaaaaaagatgaagatggaggagacatcagttaatatctttgatttgtagtccaagaaagagattcaacaaggtggctgaccagaaatgttacaggaaggctgagggatataagaactgacaaaaccacaggaaagcactgttttcaaagtaactcttctagtaataaactgtgtagtacatgtcatttttatagaattcccaatgtaacacaggaaaaggtgaaaacttcagagaagcttatggaatttttagtagtgttgagaacactggtacaataaactgtgttctagggaaatagagttgccaagtatggagagatttgaaaatctaccaaataaataaagagatactaatgcaacctgcatcaggaacaagcccagccagggcagtgttctgtaaggaaaatcttacctcacctgccacagaacccccagaaacttggtcttaagagaaaatagtctaagaagtgatggatgtctctcccaagtaatgccttcccctatcctttttatcctacttgctgactggaatttgtaatgagccatcctggaccatgtggagaagggcaaaatcctagaaatggcatggtaacaccagagaaggagcctgagccactgaggctggacctttatgtcgctttctgatctaatttgatcacagcttggtgcttggatacctctgaaataaatattctaacaaaaattgtcaggtgtgggggagaaaatttgcattttggacataaacatgactttacaacatatttcctttgttagcccctttgagggctcttgctcagggtattactgtttaaatattccattaattcatgtgttcatttatcgaacaaatatcttaggtgctagagctaaaatagagatcaaagtcatagggcttacagtttagtgttccataagggatgtatcaacttcaaaatattctgcaatacttttcctcttataggtatttcataggccatggcgaagaggctggcatttctatgatgatagagaatttatttatttgaggccttttgcttgtgatacaaaacttgaatgggtgtgccaaattccaaaaggtaagtggtagttattccttttcacaaccttctcatgttaacattgtgaatgcctagctcaaagtagctaggggagcattttgatctataattctgatgtctaaaagcctatgatgatgatgcaattaatatgtggagcaccccctgcctgactccggcttctaatagaaggctagcttattgaaatttagtgatatcttactctttgatcatggaagaatttgcatagaagataaaatgtgaggctcattcagggagattagattttggatgaaatattattttaagcaaaaggagaaatgcagaatcattttcgtttttattttgatgcaaaatgaaaaaataaagataatcttgggaagaataaggcagaagtcaagaaataaaaatttggcaggtccctgtaaaatttagaagcaattttcaatgaactataaaactgctaatactttatataaattcaaatttgagaagccagttagattgatagtatagcctttgataacagaagggagagtggggagaaatgtagataccattttactttactttttccaggaaaacatgaaatattaagaaaaatgttaagactttaattctcaaattattattattattttttaagacagtcttgctcagtcttccaggctggagtgcagtagcacaatcttggctcactgcagcctctgcctcccaggttcaagtgattctcctgcctcagccactggcgtagctgggactacaggcacccactaccgcacctagccaatttttgtattttcagtagagtcagggtttcaccatgttggccaagctggtctcgaactcctgacctcaggtgattggcccgcctcagcctcccaaagtgctagaattacaggcatgagccactgcacccagcctcaaattatttttaagcagagattggctgtatgaaattaattagcagaaaacccatagaaggtttttaaagaaatctctgaactgaatgtaaacagatcattgaaactaaaggtatatcctcctacaagttctcaaagaacccaaagttcacatcatggaactgcctattagaagattgttattcctaaaatagttaaaagagcttcagatgtgacatcaggtagtagcaaatctctttcacaaaggcaaactgtcaaaccagttgtaagggaaagacagttgtgttgatgggtttttctaaaggataaattatgcctaagttattcttgattattttattaaacccaaaaaagggacaaaggaaaaccagtttggatatcctttaaacaagtggaaaagtaacttgtatataattaattcggacaatgtctctgttttgaagtgttaatgtgagcctcccattactctctggcatttgttagcattccacagacagtgtcattgttccaaccaaagtgccctcgatgggagctgctgcccccacctcctgtttgagcagtggagcagaccccagagtttaaacaagggcaaccttagaaatggcaaattagccaccagaggaaatagtatgaagggcatgtggaggtgtatatatattttttttaatatatattttttaacaagagagaaaggaattaacccacttaaaaatataaatcaattaatcgaacaaatctaaataattccacctccattatccccatgcagaaataaaataaaaaactaaactcctgttctcagcctgtcccaatcacttgaagaaatcaatgattgcttgctccagggtttaaatgttatgttcacccttttttgaccgtactgtacctaactttctaagttacgatgtgatgcattcagctggttggatattttcttggttattagagcagcctaagtttactcaacttgtattcatctgtattttctggttttcttaaagaagttttcctcttatgtattctaaatcaccatgcctcttctctggctcttgcctttttattacttggttctaattaatcctctcttccctaaaagagatattttgacaacctgtaaatttgaagttacctcaaccacagtggatatttgtactttttaaatattattttttgagaaaactgtgtcaaaaataaggctcataaaagtgtttttaggaaaattacctatgatgccattacccagacatagcaatttttattgtatttcttgataccttgtacacacatacatgtttgcaatcttgtataaaaaacaccttgcatcctacttttctcactaatttaaagatatttaaaggttagccatagctttccctcccccacacacaaataatcagaagtctttgacaagattacagacaagaaactatgtacattttgaactgacttgcaacattattgttggaaattatccaatacgaatagaactggctcagagagagactaaagatgctggctattcaggcagtcctctgagtcaggtcttctgatgcctgcctgaggctcacatgccacaccaaaattaagaccagctattttactctgtaatttctaagattaagcaaatgatgtctttgacttgaagccagtgtgatctgtggccagaatgaaaagggggaggaacgcaaataggctcccatggggaacttccctgtgcctggtcctgtgctggccacttcctccagggcatcacacgtgaccttcactctctgtgagtcaggtagccatctagttttcatagaggagaaaatcaaggctcagagagggttaagccactcatccgaaataccatggcagcaaaatgcataagggcatttgcacactgacccgcccagcttccaacccggaattctgtgtagcatgccattatttactccgtttccatctgggaatcctgagtcacttttaattattttcctctcagttttgtctcatcttctcaaaaggttcaacactggagcattgtacattgtttccaaggatatcttggaagacaatgaactctatcaacctaagtttacagaacagttaacctgtttcattagatgcagaagtggttcctgaataacttcccttttcaatgaccgttattttggttcctacttcttatgcttctgtgtaacacatacaatatcattatttacttgtttttactttctaattcttagctatattttatctgtcttacttcttttgtgacctctgtgacacaaggtaaaagactgctagaaatacttcattaatatttaacgtatctgccttttggatttctcctgaagcaggtttagcatcggccctacaaaatacaactaaagtgatcaaaacgtgaagtgggttggccagaaatggacaagactcaacaatactgcaagtcctttcgagctacattaaaggccgtacttatagtataccctgatctgtcatggaatactaatgccacttgctttcttcctcatacaggccgtactccaaaaacaccagactggtacaatccaggtgagttaagaaaactgaaatttaaccaaagctgcttttaccttgtcactaatgcatttagttaattatttaagtgccagcttcttctctatacatcttcaagtgagacaaaatttctccaggcaaggaaggtgagcgactggtatgggatgaggtgatgagggtgactttttccttccctgtgagtgtaggggagtggcagagtcactggctcaggaatctcttgttccttgtagtcagtactgccccagccagagagggccggtaatctgaattactatttatagttttgaacattaactcatgcttagaggacacagtttgctttgcatagtcataattctaatctttttcttcttcttctttagaccgtgctggaattcatggacctccacttataattgaaggaagtgaatattggtttgttgctgatcttcacctaaactatgaagaagccgtcctgtactgtgccagcaatcacagctttcttgcaactataacatcttttgtgggactaaaagccatcaaaaacaaaatagcaaatgtaatttaaaagaatatattttaaatatatttcttatttttgtatttattccatttaaaaatattacaaaaattttgccaaaatctacaaaagttaaatttttctttaatgtaaaatctgcctcacagcatccaaatttgtttcatgttagaaaaattaagtagaattgcttatgttttaaaatatacaagattaataataaatgtcactttataaggtaaacatcagtagataatatagatcattctaatttcctgtcacattttttactaaaagtcaactttatagttaacttgagtttctgtttctactaataagtaactttgcaaaataatttttgggaagaaaaataatttctgtatttttaaatttataatcaattgcaataggatactgtatgcccacttaaagtattagtctaattaatatatgcccataattacagctaccatatttcctgtacccacaataggatctgtaaatatactgagaaatttcaactactctttggcaaaaggttctagtttgtataattttgaaatctaagtaaggaatgtctggaaattttagtggttagtgattatagtaagacaatgtattcgaatcaaaaccctcaagaaagctcagcacatataaggatggatgtttggcttgtttttcagatatctggtgatggacagaagtggtggataagaattagcgagtggccaatagatgatcattttacatagtaggtgacatcattgattctacctttgtaaagttatcacttaaaagaagcagttccttttactaaatggatttctatttataagtagtttgaatattaatccataaactgcctaaattagagaaaccaagcccttttgcatgttagcatcaagaaaaaaggggtatagagtaatggtattaacattaaatttagaaataaaataacttacagtaaaaagaaaaaaatggaacacctaattacattacgagttgtcaaatctgtcattttcttttagctcacgatatccatggcaccgctttcctgtgacatttggagaggaatgcttgtacatgtctgccaagacttggcttatcggtaaagttaattctaaatcctttaatgctgattatgtaatatgtgaagttcaggttcagtttctagcttaatcttgttttccttttaattatatgtttggtaatttcatcttattctgatttattattagcaacaatagctcaaattcccaatgcaaataaaggtacttttcactgtgaatattttaacttcctttatcctaaagcagttacttagtaataaacttaccactttcctaactgataagtgtctaagcaaattttcaaagataagcaggcagcagttctaaaatatagtttaagtcccctccccctgattacattgccccttcaactctcttcctacctcctgccttcaccctgggatggtatggtagtcacacaaaatgtgtgctgtttcatagacagtattggtatgctgtaacctactgataaaaataatcatagaagacagaaatggctagagaagaaagggaatatattttaagcatttaggaaagattgatttcaagagcctttctttactactgggttgcttttaaaatgtgctgacttggccgggcacggtggctcatgcctgtaatcccagcactttgggaggctgaggcaggcaaatcacttgaggcaaggagttcgagaccagcctggccaacgtggtgaatccctgtctctactaaaaatacaaaaattagccaggtgtggcagcatgcacctgcaatcccagcttcttgggaggctgaagtatgagaatcacttgaatctgggaggtggaggatgcagtaagccaacattgcaccactgcactccagccccgggcaacagagcgagactctgtctcaaaaaaaaaaaaacaaaaaaaaacacacaaaacaaaataaaaatgtactgactgaaaaattctcaccatagtaatcctggcttttcatttctcagacttaggtaaaccaacagactgtagtaccaagttgcccttcatctgtgaaaaatataatgtttcttcgttagagaaatacagcccagattctgcagctaaagtgcaatgttctgagcaatggattccttttcagaataaggtaaaaagagaattgctacattatgcaacaatgattgcttccatgctggttttatagcctatggcagaatggcaacccattagtgacaacatcactgaaatagactctgcatgtttcaggatcccacctggccctctgtgttgccagaaaccgtggatgatatcaagaattaactctcaagttggtcatgcctacaggtcttttaaagtgcagcatttctattttgttgctactaacacttaaattgcttaagttgatctgttgagggattgggatgcattgaatagtcaggactgtctctatggccttataggaaactgacttaatttctggcttgtgttttctttttcccctcaaggagagcatccaagcagcatctgccaatcaaattagaccagcatttcacaaactactttttggggactacacacatgctacaaaatgttaatcattgatcttgcctccaaatgggggttttatgattaaataggtttgagaaatgctgcattctgtatctgcctctttgagatgcataatccatgttggtatatgtatgtattaggaaatgcatttggcttctgaaaagaggttgctacagtatgagaaaagatttattctgtcacattaaagacatttgaagataagcaggtttgtgtggaaacaccatgaagtcttcaaaatcaggcttcttttggttttgctctgccatccttaatataaggcttccgagcttaaattcagggtgttctctctagggtcttttctagaagttacccgatgagtttgtccacattgggtagcttggctcattggccactccagtctataagaaagctgaaaaaaaaattttttttgtaagatatttcaaggaacacaatttgggacataccactctacactaaagtgatcataatgtgaaaaagggaaaaaagagatgtgtctgacagctgaaagcatctgtagtaaagctaggggtacattttaactttttaaaattaggacaatctttttaattcctcaaggtaatagtactgtgttaatttgcatagctgatataaatttgaattaaaatatcctgccaagaaagagatgaatttttcaacagtgtttcttgacataaggagatgatgattaaggacacagattttgaaattaggtggaacagagtacagatactgaccttactattgtgtggctatttcacttatggatgaagttatttaatgtccctgtgcctcagtttctgtctccattgtgagaattaaatgagataatactacacaaactgcttaacacataggaagcactcaataaatgagagatctttaaatatataaagatataatataaaatatatattaaagatataatatacaatatatatcttatatataagatataatatatatatatatatatatatatatgaaagtttgaagaccgctcttcagttgtttcaattgagaaggtagcttgagcctggaagctcaaggttacagtgagctatgattgcaccactgcactccggcctgtgcaacagagagagactctgtctcttaaaaaattaaataattaatgagagcataaacttgaattcttatggtactacattgcaaattaccatatctcacagaccgaaaattagcagccctctaaaagatgaagcattttacttcctatgtgagcgttcctgtgtctggaatctcatgcttcacatatgtctttgtttgcagtgttttctaaagatcaaacccgtgtctctcacattttctcaagcaagcgatacctgtcactcctatggtggcacccttccttcagtgttgagccagattgaacaaggtactggaattatttgggaaacatgttttattctgatctggggccaggttagttttaggaggctatggggaattaacatacaaaaattcttattaaacttcttttgttatggaacagataaaagactatgttgatagataaacaaaatatattcattgacatttttaatgtatctttaatttgaataaatcaaatgctttttaaaaatctctttctaacagactttattacatccttgcttccggatatggaagctactttatggattggtttgcgctggactgcctatgaaaagataaacaaatggacagataacagagagctgacgtacagtaactttcacccattattggttagtgggaggctgagaataccagaaaatgtaagtttttttaaaaaccaatactcttcatacctctgtgaaatacttgagtctttcatacatttttggactaagcaaaaccccactgtattattccatttgtatgaaatgtccagaataggcacatctaagatagtaagtaggttagtgattgctagaggctacgggggatggaaggattgagaatagtgcctaaagagtatggagtttcttttggggatggcgaaaatgttctaagatttatggggtgatggttgtgtaactctgtgaatatactaaaaactattgaatatgtactttaaatgagcgaattgtctcatatatgaattatagctcagtaaagctgttgcaagaacaacaggtgcctccccagccttctgatggatgtactggtttttcacagtagcatcagattccatagcacttatttcataaccatataaaaccatcatgtagtgagttgtaaatagaagcaaatacagatgttttgctttacattttgggactttgggctctcagcctcagtctcctgaggcaaaaagtacaaaattggtaactggtgatcatttttccccaagagctaaatatagggaagtcagagaagggaagagggcattatactgacagtagttatgctgacaccacagtattaccgcccactgcttctgttctctatactttctggatgcagattaccttttgcacaaagggcaaagattgagaaattaacataaaagtctaattccaaaagtatgtcttagacagtaatcaactgatattcctgacataatgttactttgctcaaagttgatgttggtagcaaaggaagttctcaatcgtgagtaactatgtacaatataaatatcaaattattacttggttattatagaagatgtggaagttagagtaaacgcagcaatgaaaaatgtcaaccctaatcttaagacagtttaaacttttaagcataatctatagtaagaaatacatttaaatcaccatctagtatatagatatagatataatattaattgaaacaaaagtttcaagaaacaatacttacccttataatttatgcactctgatatgttcgttctcttctattttgttccattctcctgtcttatcctatcctttactgtccaatcctactatctcctattctgttctatttcattatcacaaatacttgccaaaatccacttaagtgatttcatgatatacgaaatgagtctcaaccatatttgagccctagactagggaattacaatgagtacttgagcatcttttcttctagggcttttccatacactgttttcttgatataagtgagatcatagtatatatactattactctgcttttctcagtttgtattatatcataagtagtttcttcagccattaaaagatctacttgataagctttttaatggttgctggggaacaggtggtgtttggttacacgagtaaagtctttaatggtgatttgtgagattttggtgcacccatcacctgagcagtatacactgcactcaatttgtagtattttatccctcacccccttcccatcctttcctcctaagtcccccaaagttcattgtgtcattcttatgcctttgcatcctcatagcttagctcccacttattagtgagaacataacgatgtttggttttccattactgagttacttcacttagaataatagtctccaatctcatccaggttgctgtgaatgccattaattcattcctttttatggctgagtagtattcctccatcatatatatatacatacatacatatatatacatatacacacacacacacaccatatataaatacacaccatatatataccgtatatatggtgtgtgtatgtgtgtgtgtatatatatatatatatatatatatacacaccataatttctttatccattcattgactgatgggcatttgggttggttccacatttttataattgcgaattggattgcacaatatttcttgattgatatgccatcatttacctaaccagtgctgggtgttaggttgtttccagttttacacaatcataaatagtgctgcaatgaacacctttgtgtataatcttagcctatatttcacattacctgcagagagattttggaagtcatgtagccagatcaaaggatataggtaatataaagctctgattaccaacttgcttccagaaaggtttatgaatttacattcctattcacagcatattgtgattgtccttctatcctcaccagcatattattaatttccaacatatatcaagcagttaagatgtgccaggcactctgctaatgtatcacatacattatttcatttaatttgcccaatagctatgaaataaagatgttacccctgccccaccttagaaaagtgaagatggagtcagtaacttgccagagatcatgcagcctatgcatgcagagtcacggttgacatctggttctgggtgggcatggtggctcacgcctgtaatcccagagactctggaggctgagagggggaggcctgcttaagccctggggttcaagtctgtagtgagccatgattgcaacactgccctcccatgtgggcaacagagcaagaccctgtctctaaaaaaaattgttttaattaaaaaatgagaaaaaaggctgggcgtggtggctcatgcctgtaatcctagcactttaggaggccaaggtgggcggattgcctgagctcaggagttcgagaccagcctgggcaacacagtgaaaccccgtctctactaagaagtacaaaaaattaaccgggcatggcagtgtgggcctgtactcccagctattcaggaggctgaggcaggagaatggcttgaacctgggaggcggaagttgcagtgagctgagatcgtgtcattgcactccagcctgggcgacagagcgagattccatctccaaaaataatataaaataaaagagagagaaaataaaattgcctttaaagagcacttggtttttaaaattcttcttaatttggtagtttgatatcgtattttcattgatctttctctgatttctaatgaaaacaaacttcaataagttaaataatcattcgtagttcatcaagtgggagtgttctttttctttgcaaatttatctatcaaacccttcatgtatttcttattgattttatgactttggaaatatcaaatatgctgatcctgtatttcttgtgtttattgcaaatactttcctaagttttctttaagtctgaatgccaaaaatattacagaaataaattttgactattttttaatatgttcaaatctgtatatttcctttttatttttcctctgttgcttttaggttagaaagtccatcatgtaaattgtaaatattagttaaatatatgtccatattttcttctagttttgtttcataggttgcctttttttgttgttttttctgacacagggtcttactctgtcacccaggctggagtgtggtggtgcattcataacttactataacctgacctcaagcaatccgcctgcctgagccttccaagtagctaggactgcaggagcgcaccaccatgcgcagctacattttctaatttttttgtagagacagggtctcattgtgttgcccaggctggtctggaacccctggcttcaagtgatcctcccacatggtccttccaaagtgctgggattacaagcaggagtcaccacacccagcctctgttttttgtgtgttttttttttcccctttctgatagcatgttacatccatggtatatgatacatgttgtcagtgcatgcttaattattttccctaatcctagccacttgttctagcatcatttattacatatactttcatttgttaaaaacaatataggcctgggctagcactttgggaggctgaggcaggaggatcacttgagcccaggaatttgagaccagagaccagcctgggcaacacagcaaaaccctgtctatgtttaaaaaaaaaagagagagaaaacaatatagcaatataggatgcctcttttatcatatattaggactgtgtgtgtatgcatatatatgtgtatgtgtatatatatatactgtattttataatatttatatcagtatggtagctatttaaaaatatttctcatatacataatgtgtgtatgtgtgtatataacatacaaatacagtcagcccttcatatccatgggttctgaatctggattcgaccaactgcaggtggcaaatatttgagaaaaaaaattttttaacctacatcctcctgtatacttaaatcatctctagattacctataatagctaatacaatgtaaatgctatgtaaatagttgttatactgtattttttagggaataatgacaaaaaagtctacatgttcagtacagacaaaaaaaattttttctcaaatattttccatctgcagttggttgaatccagattcagaacccacggatatgaagggctgactgtattgatatgttatatacacacatacacatattatatatatgagaaatatttttaaatagctaccatactgatctaaatattataattttaccatatttttaaaaactataataggattaattatactttattacatgcccttaaaacatacttttagatattcttgtccatttttccaggaaaactttagaattattagtcatttttcatccaaatagttaaaattttaaaactcttgatgagaatttgactacatgtttgggagaattgacatctttctattaatcttccaattcatgaatttgatatatctatttattcaactcttcctttagatcactctgtgaagttttatagttccatctctttctcattgtcattaacaatggcaactttagctataaaaagaatggaatcatgtcctttggagcaacatggatggagctggaggccataatcctaagcaaattaacacaggaacccaaaaccaaatactgcatgttctaacgtacaagtggaggttaaacactgagcacaggggagagggagggagggggacctgggttgaaaaactacctcctgggtactgtgctcactacctgggtccaacacacccatttaacaatcctacacatgtgcccccatatctaaaataaaagctgaaatttaaaaaaaaaaaaaaaaagaatgacagctttaaaaaatttttcttactgatttgtggggaagctattgtttgaatttgttatgggtttttttttcccccataggcatctgtctcactaaaagctctttctctctgagtttttcattagattttcttgggtttcctaagtagctaataataatatacaagcaacagtgaccctcgttcctatagttacctctctcgttttcatttcatgcctcaccacatatgctagaatttccagaatttccatggcaaataccaggagcagtagtagccaccattgtagacttgatctggacctcaacaggttgttaaacattatgttgactcttggtttaagatatagcattctataactagcttgtttagaacttttaatcaggaataagtactgggttttctaaaacttgttcccagcatctgttaagattgccatatagttttttttttttttttttttaccattaggcctatttgtacgtggtatatattagtagatattgtattaaaccattttacattcttgttgtaaaatctgggtgctcagagtggattaatattttactattctgcattatatttgttagaattttacttgggaatgtgttcctctctcttcatagagtcaatttcttatgctatattgtcatatttttttctgatcatgttagcctcataaaatgactgggtagctttccatcttttctgtgttctgaaattctgactcagcttggggaattctctttccctgaaagtttgggggaactacctacaaaatgttagaacccttatccaggagcatttttgctttttaaaaaattttaattattccttatttataattgactcataataattgtaccaatttatcaggtgcagtgtgatgtttcaatgcatgcatgtgttgtataaacaatctgatcagggtaattaccatattcctcactttaaacatttatcttttctttgtaaagataacattcaaaaccttctcttctatgtgtcttgaaatatacactacattgttctttgcagagatcatactctaatgataaaggaatttggtgcagcagtgaagggcccaagctctggagtcagattgcctaggtttgaattccagttcagccatttactatgcctttggaggtttacttaacttttcttaagcctcaatttcttatctgcaagctctaattctgttgcattaccttataaggtcaatataaggattatataagataatttatttaaagctttatcaatagtacctgacagacagtaaaaaaaaaaaaatggccattattaattttccatttccttcaaagtgattgttacattttggtatttccatttttcgttatgacaattatgctaattggcatttttcaagaaagttgtctatttaatttagattttcaaatgtattgaagtaaagttgcttatggtatttaaaaaatctccattatctttgctaacatttttagtttgcattatttacatttttacaaaaacagatgcatgttattggttttgtccactctcttctccaccctctactcctattgcttgacctgtgttataaatactatttctacctttttctaccccatttttcgtggggttctgtttttgttcattttccaatctcctatattgaattcagttcatatttcctttaaaaaaaagagaatatatttaataatacacatttggctccacataaagttttactcataccaatttttttgacatttctcattttattctttcctataattattttagttcatttttggtttactatttattgagtagcatttttttttgtcagtatctcctggtataaacttacttttcttatttttctaagtgtgatatgtttcaaacatacagaaaatgatagggataatatacttggaataaattttcatatctaatattattgattgtgattagaaaatgaaatctagatacttctgttttaatatatggagatttttatagtgactagtataggatcagagctttaaggtatattctgttatgtggtacacaacttgttacaaaaagtctataaaaatctaataagttgaattaataatcattatgttttgcttatactgtagtcgagtgttaaatattgctggaggtgttttatcttatttctaatagtttatctctttaaaaatatgtttatcaagattgccactattttgttttttataaagttaattgccctttatccatgctttgaaagtttttaaagattttctaggaaatgtcatggtcaggtccttcatggaattcttttatagggggacaaattcaatctagaatctaaacttttcttgctaggagcttcagaccattgttacatgattgcatgtatgtatttgcctttttgtttagttttttgaggaagagtctcgctaccactgtgccctaatactcaacctccaaaaatcaccgtttactgggacgtggaattttacatcctgcagtgaacgccactttgtgtctctctgtcagaaatattcaggtaacaattattatctagataactatggtactttatgctattacatatatatatatagagagagagagagtcactttctatagggagggaggggaacataggttgaaaaattacctattgggtagtatgcttaccacctgggtccaatacaccatgtaacaatcctacacatgtaccccctgtatctaaaataaaagccgaaaaaattttttaatactataaaagaatttatattaatttataatcatatggcttaaaatttcagcatggctaaatccatattgggttagtgagtcagagtttatcaaatggaatgtgatttttttaaaggatcattgccataattaattaaattaattaattgtatctgatggaatttgttaatagtagttatcccattatagtaattgaattttgttcttttttctactctggcatttttcagattttacattttattatgggaaaaggagaaaaaaacttcatatttttaattgagtgcagtattgagtattaagtccactaatagtattcactgttaaatttagcattaacaaataaacaagtgggggtttgaaacattataaacagatcactgtctatgcctttccataatccaaataaaagtagaatgcatacttaaaagtaggcatcatccatattttgaaaaatatatttttaaaaaagtattacattatttttcattgatcacaatgtgtttttaacaaatgatcaagaaaaaattttgtcatataatgagaactgtaagtagatatctcatgtgctttggcagaatttttttttgctaaattaatctttacccattttttccatgtttttaactaactcctttattagcgaagtactataaagcaataattcaaatacctcctcttgtggatggtttcttacatttcttcatgctagctctcccaggtgaaaactttgtaaggggatacttaatacatttatttccttcaaacaaaagaggtatttagcaccgacatgacatgataatgcaggttacatttatttgcagatattctcttcataaatcagaaaaatgaaacagaatgttgttctgattttagaaaacaaatgttgcagctcacacattttccttaaggtatacagcaagacatacctaattctctcacccaaaatctaaaataaataggcaaataatatctaaattagattagtatggggagaaatgtgaaaaaaatgtcccataacttgcagagtgtggggaagggtttgttgttgttgttgttttcttttacatgcagaagttaaaagcagacagacgttgcagaatgcttcagaaactgtaaagtatctaaataatctgtacaaaataatcccaaagactctgacttggcacagtgctaaaagggagtgtctgaaaagtaacatgcagctggtgagcatcacggacccttaccagcaggcattcctcagtgtgcaggcgctccttcacaactcttccttatggatcggactcttcagtcaagatgtaagtgttcagtcccaactgccaggactgggtgatggaaagcgacattttttattgtgcatagcttctctcacagcagactaaaacaaacagaagaactgaaaatcttactccagtaaatttcatggaatatgtcggggtttttaaattttgttttgagacaaaggctcacactgtcacccaggctggagtacagtggtgtgatcacacttcactgcagccttgacctcccgggctcaagcgatcctcccacctcagcctcttgagtatctgggactgcagttacacaccaccatacctggctaatttttgtattttttgtaaagatgaggttttgccatattgcccaagctggtctcaaatgcctagactcaagcactctgcccaccttggcctcccaaaggtgctgggattaccagcatgagccatggcacctagcagcaatatgtggtttttagaggcaattatctttccactattgaaagatctagtacttcattgtttaaatgaggaaaaggttctggtggagatatatatatatttgagcacttctttttatttattctaatcaaagacgagctagaatctggagctgccatatctcttcagccaatgaaaagataagggaagaatttaaaaatcagttgtgtggaagcactatggatagtgttaaagagtcctttccatccctttctcttttttctttttcttttttttttttttgagacaggttcttgttctgtcacccaggctggagtacagtggtgcaatctcggctcactgcaacctccacctccaaggttcaagtgattctcatgcttcagcctcctcagtagctgggattacaggcatgcgccaacacgcccagctaatttttgtatttgtaatagagatggggtttcaccatgttggcaaggctggtcttgaactctttacctcaagtgatccgcccgccccaggctcccaaagtgttgggattagaggtgtgagccaccacgaccagcttccatccctttcaacatcagcagcatggctgggcaccgtggtgcacacccgtagtcccatttactctggaggcaagaggataacttgagcccaggagttcaaatccagcctggactacatagcaaaaccccagtctctagtttaagaagaaaaaattcagcaaagtaaaattaagcaactctgaaaaggaggttgaatagtgttttcctccatctcaagtgctgatcctagatagatgtctcaagcacttctcattcatttcagagcccaacaaagaatgctagtctcctactaattcgcatcactaacctctgcacatgtagcacaaaccggaatcattacacagctgaagttttggctataattaaataagggatttttaaataaagctgtggtattcctattggcattataggccacctcttttctcagccatggtatatcccaaagtataccaggatgggtctagggatgcatggaaaaaatgcgattgaagactcagaattgaactgaagaatggatggaaaaacaagaattgttatcaaaagctcaattaaaagtagcatttaggaatagcttaaagaatagtctctctgagccacagggtattctaaagttaacccagatcggccgggcatggtggctcatgcctgtaatcccagcactttgggaggccaaagtgggtggatcacttgaggtcaggagtttgggaccagcctggccaacatggtgaaaccctgtctctactaaaaatacaaaaattagctgggtatcatggcgggcgtctgtaaccccagctactcagaaggctgaggcaccagaatcacttgaacctgggaggtggaggttgcagtgagccgagattataccactgcattccagcctgggcgacagagtgagactccatctctaaataaaaaaattaattaattaattaaattaaattaacccagagcaagccaggagatggggaagctgcttactcagtcctcacagtctcaattgttttatagcattgcatttacttgctttatcttcagcattggaaattctgtgaaacgctttgttgtgtctgttgtgaggaaacaataggtgattacatttcctagtttcagtcaccctaaatcttttgagacaaaaacagtattgcaatgtagaaaatttgtcagtaattaaaagaacaaaattaaagtcacctgtaatgccagtacctaaaaataaacatgattcaatcaatattttggtatggatctttcaagttatttttctatgtgtacctatttattttttagacagttggaatcagactattttgtaactcccctccccacttaatgatttgggtcttacttcttatcctattttcaacctttacctatggttctcttttccctttcacccttaattttaacatattctgtgtagctgtttaactatatatcctaatagctgccttaattctttgaaaatgacaggatgttaataaatactttacattgaaagcaatgagaagatattgaaagattttaaacagagtagtggcaatataagactttacttaagtagacgacactgtgtggaaggccggggaggacgcaagcagctggagagagggagagcagttatttttctataaattcatgcaggaaatgctgttggcgtttacagtgtctgaggagaggcagctctgggttatgtgaagtgcagagtgtggccatgcagtgggtcactcaagtacccagcttgaagaaataaaaatacatagaattaaaggaagtcaagaaggcttggaaacatgaacacaggcatcccaagttaatggtaggaccgggaggacagcaagaattgggacatcttagtgaatgtcagggaggagcaaggcgaccaagtcctcagtgaatgtcatggggagtttgcagtgatacaaggggaataatcctgaaaggaaataaaaggagataaaaatatccactactcctttctcatagtcctgtggtatctgagaatagaatatcaaatagtcttcccctgtgggtgctgaaaggagattattcccttggaaaagccagatttatgtatttatttaagattcagggggtacacatgcaggattgttacaatacatacactgtgggatgctgaggcttgggcttcagttgaacctgtcacccaaatagtgaacacagtacccaataggtagtgtttcaacccttgctccactccctccccacttttggagtccccagacaatatcatgcccatctttacatccatgtgtacccaatatttagctcccacttatataagtgagaacatgtggtatttggtcttctgttcctgcattaatttacttaggataatgtcctccagctacatccatgttgctgtaaaggagatgatttcgttcttttttatggctgcacagtatgccatcatgtatatgtgctacatcttcttgatccaatccactgctgatggacatctagattgattccctgtctttgctgttgtgaatagtgctacaataaacatatgagcgcaggtgtattttggtagaacgatttgttttcctctgggtatatacccagtaatgggattgctgggttgaatggtaattctatttttgttttttgggaaatctccaaactactttccgcaggggctgaactaatttataatcccaccaacaatgtgtgagcattccctggaaaagccagagttaaattaagatcaattaagatcaagaatttagtgaaaagatatttatagtcttcatactttgtattcagtaaaaagataaaaggtgtgggatgatttatttagatggaatggaaattccaaaggatcagggacagggttaggtggggagtgcagcaaaggggaagaaatgcagggcagtctgaatgagtgcaggcaaagtcgcatggccgaagggccacactggaggccacagtggcttaggccctaactgggttaggttaggggctaggattacagctggaactctggtcatgaacatttcagaatgaagcagcgagtggtgttgaggcttgactgtgttgctgtttatggtttactaaggagactgtgtcgcttcgttccatatttcaaataaactagtgatgcagattgtcttgggactcaggaaagcttagctcagtgggtctgttaggccagcaccaggcccaccagtgggtatgtaaggtctctggcagcaccatggggaagctcagacaggcctgtaccccacaatccatctcctgtacctagatgggtggtcaggaccttggcagggtgtaaaggcagacgttcacagacctctagcacacaacagaatctagtgaatgaagaagcttctctccccaacaagtgtgaaaacagtgatgtgagagccacagcgcctgaagagttcagaggaagggaaccaccagctctctgtgtgccagctagcccctgggttgcgggctttacacatgttatcccattaattccagccccacgaagttaagtgtcacacttaacttggtaggggatggaaatttggagagatggcacatgaaagctagtaagtgactgaatcaggattcaaaaccatgtaggtttagctccgtagcccatattctttccactatgccaggtggtctctgatctaatcagtacttatagtgatcctcaccccattttagctttctgatttctgataaccagtggatccaattatgtgtgaggcagcgtagcataatggttaggacatagactctggggatcgacagcctggcagaaaggcccagcactgtggtttgtattctgtgggactttgcacaagttacatacctttagtttcctcatctttaaaatggagataataatagtacctctcctatatggttgttacaaggattaagtaagccaatatttgtaaagcatttagaacaatgcttgttatgtagtaaatggtatgtaaatgtgtattaaatattaaaaaaattaaaaatcattagattgaccatgggagtcaaaataatacaaagggttaacatcaatattgccacctgaaatgtacttctgctccttacaggatgaactcaactttggttggtcagatgggaaacgtcttcattttagtcgctgggctgaaactaatgggcaactcgaagactgtgtagtattagacactgatggattctggaaaacagttgattgcaatgacaatcaaccaggtgctatttgctactattcaggaagtatgtgaatttcagatcttttaattcttaaattattaacagtcccataagtggtagaatttctgaggagtggttttataaaatctggttttggaattgtgaagaaattatagtcatgtctttttatggcaacatttgttgtgaaaatttgtattcaagtagaattatatattacatatattattattaatgggtcattttaggcatgttttatttttatgtcagctgacaatggggattaacacttaaaatcccattgttactctacctctttctgcatatatttatagttgtagaaagcttacatttgtgagaattcttttgtgattcataatatcacaactaacaggacttttatgagtcttaagattcacagcaaccacctcaagctagcttaagacaaggggaaatttaggatccccaaaacggggatagagctgaacctataactggagatgagttgacaatttctaaatttcactttgtaaatccctagagaacatctcatgaacttagcctgagtcaggtgtgcagtctctagcccagtcagaggaaagtgtttttacaactggcaaggtcacatttgtgggtctgtggtagaaagaagacactgcttcatggacaaagggacttattgtgatccaggagagatactgagtgatctctgccacatattaaatcagtttaatgtatttgagtggaatatgtttatatttgtatctttgtgaatgtatggccttttcataaaatggaaaaagatcataatcagatactgtagatgtcagattttaaatattatttttgtttgacttggttaaagcaataacttatttagaacatcaatgtttcatttaaatgttcctttaaaattaatagtatcagtagacagaaactttaaaataaattctcagagttatagttaggtgacttttaataatgaatatgtttgtacagcatctctaggggtggtcccttgtacttgacatttggtaatgcaggaagacagaaactgcatttaacctaatagcacctcattttttacattcttccatgccacagcaggggtaagaaaattgtgtcaagtaatttccttcctatagaaagctggctttttgtgtgctatatctgagtataaacagagacaggcttcaccaggatattacttctcggcttcctgaatatttcctacaaatcaagcctaatgactgcaaacaggatttaacatttatatctcaaattagaattcttaccattaactctttttctagatgagactgaaaaagaggtcaaaccagttgacagtgttaaatgtccatctcctgttctaaatactctgtggataccatttcagaactgttgctacaatttcataataacaaagaataggcatatggcaacaacacaggatgaagttcatactaaatgccagaaactgagtaagtattatattagtccattctcatgttgctataaggacatacccgaggctaggtaatttataaagaaaaagaggtttaatggcctcacagttccacatggctggggaggcctcacaatcatggcagaaggcaaaggagaagcaaagacatgtttacatggcagcaggcaagagagcatgtgcagggaaactgccctttgtaaaaccatcagatctcataagacttactatcacgagaacagcacgggaaaaacccaccctcaagattcaattacctcccaccaggtccctcccatgacatgtggggattatgggagctacaattcaacatgggatttggatggggaaacagccaaaccatatcaagtatattatactgtcattacttattgtattttgctaattaaaaaaatatttcctgtgttataaatatttctaattagcactagtaactagatgacaaaaatattcatctcctaatatctacattatcagtgacaaagtattaaaatttgtgttagttaaaatggaaagtataggcataactcctttctttactcttccattcaagaactagtctatgtttgtaaggaaggcaggttctcctttaaaaggaaaagaaatgggctaggcacactggctcatgcctgtaatcctagttctttggaaggctgaagtgggaggattgtttgatgccaaccattcaagaccagcctgggcaacatagtgagactttctgtctgcaaaaaattaaaagcatggtggcacatgcctgtaattctagctacttgggaggctaaggagggaggatctttgaacccaagaggttgaaggtgcagtgagctgtgattgaaccacctgcactccagcctggataacaggtgaccctatctccaaaaaaaaaaaaaaaaaggaagggggaaagaaatgacacacaagagagcagagaactggacattaaatcaagctaggctatggggaagtgaaaataagttagttggagcagtcaaaagcttagatacaccacaaggcagcagctaagcttaaagaagtgcacatttcacattttcagctctcaagagtcttcagataattcctatgagatccactaaggatttgtgacttccaaatgatggaactgttggaaccaatggaacaatgaacttagtgaaagttgctatagaaaatatcaaaccagtatttcccaaagcatgctccgtataacatcagtcttgagagatggtctgcaaaaagtccttagaataaggttgaaaaaaataaccaacaaaaaagaaaaaggttgagaaacactagacaccatagcttcctgttggacattaacaaatgtacattaacatatgccttaagaaatactggcataaactagtttaattttgtttaaaccaatgtttgcaaactttttttaaaatccatgtagatcttttctgaaacttccttgttaattttgtgaggaacaccctttgggaaatattaagcctttttaaccctcatactgaaaactaaggaaaaggaagatctgtcgtatagcccagcagtccccaacctttttggcactgacagggaggggtggatggtttcaggatgaaactgttccacctcagatcatcagaccttagttagattctcataaggagtatgtaagctatatccctcgcatgcatagttcacaagagggtttgcactcctctgtcaatctaatgccacagtgctctaacaggaggcagagctcaagcggtgatgctcgcttgcctgctgctcacctcctgctgtatggcccggttcctaacaggcccggttcctaacaggcctggttcctaacagtaccagtgtgtggcccgggggttgggaacccctgttatagttcatctaagaggttctaattattatagcgtaatctttgacagtatatcattactatgggtggatttataccaactgaaaaattacctttaaataggggaaagtgaagtgaatcaatgttttaaattctctactcagctactagttttctattataccataagaccaaatttaacatcaaaacatttgaaaactccttaacctattaattttagtacaatgggataattttattttacatatgtttctaattgtccaatattgtttatattttgaagtatattaaactgagaactaaaatgttttaaacttatcaaatagaagtgtactagataagtaattgttaaaattattgattattttttattcaacagatccaaaatcacatattctgagtattcgagatgaaaaggagaataactttgttcttgagcaactgctgtacttcaattatatggcttcatgggtcatgttaggaataacttatagaagtaagttgtaaatctgccaactttctctatttgtttttgtacttcattataacataattatcaagccatagttcttcaaagtacatgtctatcaatacgtgaaagtataattatgtacttagcataacttacataaataccaagacagtttttatgtctctgctctgcctttatcatcgagtttaaagttaaatggcggaaaataattttctgaattagtttgttcccgcactgctaaaaagaactacccgaacctgggtaatttatgaagaaaagagctttaattgagtcacggttccacaggctttacagaaagcatggctgggcagcctcaggaaacttacaatcatgtcagaggcgaatgggaaacaagcaggttttactatggtggagcaggagagagagtgaaggaggaggtgctacacacttttgaacaaccagaactcattagaactcactcactatcacgagaacagcaagggggaaaatcacctcccaccaggcccctcctccaagactgaagatcataattcaacatgagatttggatgaggacacagagccaaaccatatcaattttcttttttcactcttttatgtagcaactcaagactaactaaaaatgatcaccatcccatataaatcttcaatacttattttttgtttccactaactatgtgagatgagcaagaacagaatcactctattagtgttgcagttttgggtttataaccctggcttagtttatactggcccacatatgataagcattagaaaaatgagacacatggccaggtgtagcgtcccacgcctgtaatcccagtactttgggaggccaaggcgggtggatcaccagaggtcaggagtttgagaccagcctggccaacatggtgaaaccctgtctctactaaaaatacaaaaattagccaggcatggtgacgtgtgcctagttacttgggaagctgaggcaggagaatcacttgaacccgggaggcagaggttgcggtgagccaagatggtgccactgcactccagccagggcaacagagactcaagactccatctcaaaaaaaaaaaaaaaagaatagaaaaatgagacacatggtctgacaatgggctcgaatatttggaatttggactaaataccaccaatccaaaatatgattgataacaaaattttttaaaacagtctaatatagaggaaacaaggtcttgtttctaaatgcttctgagcatttagaaagatgctcagaaatgtcctgaaaatcatagacattttggaattaggaaaacctttccacggccatagagcatcaaaagcatacatttactctaaagagggtttgataaggggcacaggacaatgataaccaggggtagggaaggaaaagaagctaaattactcaaatctgcctgttttaaaaataggcttctcctttgctctctaacccatctgtttcttggggttaccaatgttttcctgaaatgtttatggttggcagaggggttaatggaaattaaactatcaagcaatagataaagacttggtttaccaagtgaggataagttcatcatagtaggacttagttggcccaaaccttttctctgatgacacttaactacccttgaattaaaatggagaaaaactagctggaaaattctgaggcttcacctgaaagtgactgaagaaacaatggtcttgtattgagccatagagaccacacccaggacagagagattgaaattgtaccctttggtatactttgtagttatattatcagaagcaactgaaaatctattataaattctgaaaaagcatttttagatcagaagactcccttattgttttaccttctttcataaaatgtttgagtaataaaatttctattaaaatatacaggcatatgagggacatatagaaagacatttcaggcaaatggcacatttgatttgaatctcattcttactgacttaatttacatctgtaagttactgttttgggttactttgatatacttatatttaattttttggcccctatacaaggaattctgtttttaaaacagctttgacttttcaatagcagggccatgaatagaaatcactgtaagtcactgtttttggttacgttgatatagaatatttaattgtatttggcacctacccaaagaagtttgtttttttaaacatttttgatttttcaatagcagggccatgaatagaaattactatgagaagccacagtatgtcaactgagagatacattaagccaagtgaaaaaagtgactttttcttaaaacaactttagaaatctaccattgcacatcatattggtcagaaaattgataactttgaagtttaggagaagggaagaggaactggaaggcatgagatgatataaagcagcaaacaagaaccaaatcgtgtgtgcagtgcttctaatgtgtcattgctgcaggcagatgtttaggggtcttgccttgggagatggtaatcaatgaagaccagaaataaccaggacaacattgggtgtgtgtaggtagtgatggcatcaatctttataccaatttataattgtaatatgcctagcacctttttttaaagctttattgcaatcatcactaccccaaaaagaaacacaatacccactagtattccctccctgtctcctagtcctcagcaaccactgatctactttctgtctctacagattgcctgaatgtaaaattctggacattttacataaatgaaatcataccatgtgtgctttttgcgtgtgactggctttttccattaagcataaagattttaaggtttatccacattgtagcatgtatcagtacgttattcctttttatgactgaataaaattccattctatggatataatacattttatttatccatgtatcacttgatggacatttaggtaaaacaacctaaattttaaaccatttttaattattatgtataatgcttctctgaacattcacgtacaagtttttgcatggacatatgtttccatttctcttgggtaaacccctgggaatagaattgctgcatcttttgtttaaccctttgaagaactaccaggttgttttccaaaccagctataccattttccattcccggtatatgagagtactgatttctccgtatcgatgccaacatttgtgtgtttttcattatagccatctaagtgagtgtggaatgatatctcactgggatttttatttcatttccctaatggctaatgatattaagcatcttttcatgtgcttattgaatatttgtatatcacctttggggaaatccctattcagattttttgctcatgttttaaattgagtctttttattgtcgaggggtaagaattctttatatattctggatataaatactttccagtatttatatataaatatataaataatttccaaattattttaaaatttatataaaatataaaattttatatttctggatataaataatttccaaatattttctcccatgactttacttatgccacaaaagtgtttttctttttttttcttctttttttattgtactttaagttctggggtacatgtgtagaacgtgcagttttgttacataggtatacacatgccatggtggtttgatgcacccatcaacccgtcacctacgttaggtatttctcctaatgttatccctcccctagccccctaccccccgacaggcccagtgtgtgatgttccactccctgtgtccatgtgttctcattgttcaactcccacttatgagtgagaacatgcggtgtttggttttctgttcctgtgttaatttgctgagattgatggtttctagcttcatccatgtccctgcaaaggacaggaactcatccttttttatggctgcatagtattctatggtatctatgtgccacattttctttatccagtttatcattgatggacatttgggttggttccaagtctttgctattggaatagtgccacaataaacatacgtgtgcatacatctttatagtggaatgatttgtaatcctttgagtatatacccagtaatgggattgctgggtcaaatgatatttctagttctagatccttaaggaattgccatactgtcttccacaatggttgaactaatttacagtcccaccaacagtgtaaaagtgttcctatttctccacatcctctccagcacctgttgttcctgactttttaatgattgtcattctaactggcatgagatggtatctcattgtggttttgatttgcatttctctaatgacgagtgatgatgagcattttttcatgtgtctgttggctgtataaatgtcttctcttgagaagtgtctgttcatatcctttgcccaattttgatggggttgtttgtttttttcttgtaaatttgttgaagtttcttgtagattctggatattagccctttgtcaaatggatagactgcaaaaattttctctcattttgtatgttgcctgttgactctgatgatagtttcttttgctatgcagaagctctttagtttaattagatcccatttgtcaattttggcttttgttgccgttgcttttggtgttttagacatgaagtctttgcccatgcctatgtcctggatggtattgcccaggtttccttctaggatttttatggtcataggtcttacatttaagtctttgatccatcttgagtttatttttgtataaggtgtgaggaaggggggtccagtttcagttttctgcatatggctagccagttttcccaacaccatttattaaatagggaatattttacccagtgcttgtttgtgtcagatttgtcaaagatcagatggttgtagatgtgtggtgttatttctgaggcctctgttctgttccattggtctatatctctgttttggtaccagtaccatgatgttttggttactgtagcctcatagtatagtttgaagtcaggtagcatgatgcctccatctttgttcttcttgtccaggattgtcttggctatccgggctcttttttggttccatatgaagtttaaagtagttttttccagttctgtgaagaaagtcagtggtagcttcatggggatagcattgaatctataaattactttgggcagtatggccattttcacgatattgattctacctatccatgagcatggaatgtttttccatttgtttgtgtcctcttttatttccttgagcagtggtttgtagttctccttgaagaggtccttcacatcccaggtaagttgtattcctaggtattttattctctttgtaacagttgtgaatgggagttcattcatgatttggctctctatttgtctgttattggtgtacaggaatgcttgtgatttttgcacattgattttgtatcttgagactttgctgaggttccttatcagcttaaggagaatttgggctgaggtgatggggctttctaaatatacaatcatgtcatctgcaaacagagacaatttgacttcccctcttcccatttgaatgcccttcatttctttctcttgccagattgccctggccagaacttccaatactatgttgaacaggagaggtgagagagggcatccttatcttgtgccagttttcaaagggaatgcttccagtttttgcccattcagtatgatactggctgtgggtttatcatgaatagctcttattattttgagatacgttccatcaatacctagtttgagagtttttagcatgaaggggtgttgaattttgtcgaaggccttttctgcaactattgagataatcatgtaatttttgtcattggttctgtttatgtgatggattatgtttattgatttgcatatgttgaaccagtctttcatcccagatatgaagccgacttgatcctggtggataaactttttgatgtgctgctggattcggtttgccagtattttcttgaggatttttgcatcgatgttcatcagagatattggcctgaaattttctttttttgttgtgtttctgccaggttttggtatcaggatgatgctggcctcataaaatgagtgaaggaggagtccctctttttctattgtttggaatagtttcagaaggaatgttaccagctcctctttgtacctctggtagaattcagctgtgaatctgtctggtcctggacttttttcggttggtaggctattaattactgcctaaatttcagaacttgttattggcttattcagggattcagcttcttcctggtttagacttgggagggtgtatgtgtccaggaatttatccatttcttctagattttctagtttatctgcatagaggtgtttatagtattctctgatggtagtttgtatttctgtgggatcagtggtggtatcccctatatcattttttattgtgtctatttgattcttatctcttttcttctttattagtctggctagtggtctatctattttattcatcttttcaaaaaccagctcctggattcactgattttttgaaggttgtttttttgtctctatcgccttcagttctgctctgacgttagttatttcttgtcttctgctagcttttgaatttgtttgctgttgcttctctacttcttttaactttgatgttagggtgttaattttagatctttcctgctttctcttgtgggcatttagtgctataaatttccccctacacactgctttaaatgtgtcccaaagattctgatatgttgtgtctttgttctcattggtttcaaagaacatctttatttctgccttcatttcgttatttacccagtgtcattcaggagcaggttgttcagtttccatgtagttgtgcggttttgagtgagtttcttaatcctgagttctaatttgattgcactgtggtatgagagacttatgatttccattcttttgcttttgcttaggagtgttttactttcaattatgtggtcaattttagaataagtgcgatgaggtgctgagaagaatgtatattctattgatttgggctggagagttctgtagatggctattaggtccacttggtccagagctgagttcaagtcctgaatatccttgttaattttctgtctcgttgatctaatattgacagtggggtgttaaagtctcccactattattgtgcaggagcctaagtctctttgtaggtctctatgaacttgctttgtgaatctgggtgctcctgtattgggtgcatatatgttttggatagttaactcttcttgctgcattgatccctctaccattatgtaatggccttctttgtctcttttgatctttgttagtttaaagtctgttttatcagagattaggattgcaacttctgctttttttttgttttgttttccatttgcttggtaaatattcctccatccctttattttgagcctatttgtgtctttgcacatgaggtgggtctcctgaacccatctcatctgaacagcacattgatgggtcttgactctttatccaatttgccagtcgtgtgttttaattgggggcatttagcccctttacatttaaggttaatattgttatgtgtgaatttgatcctgtcattatgatgctagctgattgttttgcatgttagttgatgcagtttcttcatagtgtgaatgttctttacagtttggtatgttttgcagtggctggtaccggtttttcctttccatgtttagtgcttccttcaggagctcttgtaaggcaggcttggtggtgacaaaatctctcagcacttgcctgtctgtcaaggattttatttctcctttgcttatgaagcttagtttggctggatatgaaattctgggttgaaaattcttttctttaggaatgttgaatattggctcccactctcttctggcttgtaaagtttctgcagggagatctactattagtctgatgggcttccctttgtgggtaacctgacctttctctctggctgttcttaacattttttccttcatttcaaccttggtaaatttgatgattatgtgttttggggttgctcctctcgaggagtatctttgggttgttctctgtgtcttctgaatttcagtgttggcctgtcttgctaggttggtgaagttctcccagataatatcctgaagtgtgttttccaacttggtttcattctcctcatcactttcaggtacaccagtcaaacgtagatttggtcttttcacatagtcccatatttcttggaggctttgttcattcctttttattcttttttctttaatcgtgtcttctctctttatttcattaagttgatcttcaatccctgatatcctttcttccgcttgatcaattcagctattgatacttgtgtatgcttcacgaagttctcatgctgtgtttttcagctccatcaggtcactaatgttcttctctacactgggtattctagttagcagttcctctaaccttttttcaaggttcttagcttccttgcattgggttagaacatgctcctttagctcggagcagtttgtaattacccaccttctgaagcccacttctgtcaattcatcaaactctttctccatccagttttgttcgctagctggtgaagagttgtgatcctttggaggagaagaagtgttctggtttttggaattttcagcctttttgcactggtttctccccatctttgtggatttatctacctttggtctttgatgttggtgaccttcagatggggtctttgagtggacatgctattcttttctgttttttagttttccttctaacaggcccctctgctgctggtctgctggagtttgctggatgtctacccgactctgtttgcctagttatcacccacggaggctgcagaacagcaaagattgctgcctgttctttcctctggaagcttcttcccagaggggcacctgcctgatgccagccagagctctcctgtatgaaatgtctgtcggcacctactgggagatgtctcccagtcagaatacctgggggtcagagacccacttgaggaggcagtctgacccttagcagagctcgaacactgtgctgggaggtccgctgctctcttcagagccatcaggcagggatgtttaactctgctataagtccctgactgtggctgctgcccttttttcagagatgccctgcccagagaggagaaatagggccatctggccacagcaaccttgctgagctgcagtgggctccacccagttcaaacttcccagcagctttgtttacactgggagcgtaaaactgcctactcgagcctcagcaatggcggatgccactcccccgaccaagctctagcgtcccaggtcaatctcagactgctgctatgctggcagcgagaatttcaagccagtagatcttagtttcctgggctccataggggtgggacccacctagccagaccacttggctccctggcttcagcacccctttccaggggagtgaacagttctgtctcaccggcattccaggcaccacttgggtatggggaaaaaagaactcctgcagctagtttggtgtctgcccaaatggctgcccagttttgtccttgaaacccagggccctggtggggtaggcaccagagggaatctcctcgtttgcaggttgcaaagaccctgggacaagtgcactatctgtgccagagttcctcaggctcagtccctcatggcttcccttggataggggagaaaattccccgaccccttgcatttcacaggtgaggcaatgccccaccctgcttcagctcgccctctgtgggctgcacccactgtccaaccagtcccattgagatgaacccggtacctcagttggaaatgcagaaatcacctgccttctgcatcaatcttgcttggagctgcacactggagttgttcctatttggccatcttgccagcaatccatcacaaaagtgtttttcttttgtcatttgtgcatatgtaagaaggctttgcttaccccagggttatgaagacttactcctatgttttctttcttttcttttctttttttttttttgagacagacttttgctcttgtcaccgaagctgaagtggtgcagtggcatgatcttggctcactgctacctctgcctcctaggttcaagcagttctccagcctcagccttctgagtacctggtattacagacaaccgccaccacgcccagctaatttttgtatttttagtagagatggggttttaccatgttggtcaggctggtctcgaactcctgacctcaggtgatctgcccacctcagcctcccaaagtgctgtgattacaggggtgagccaccatgcctggccttccatgttttcttctaaagattttatagctgtagcgcttatatttatgtctgtgatctactttaatttttgtgtgtggtgaaagaaaggggtccaacttcattttttttttttttttacatgtggatatccagtttagaagactattctttccacactgaattgtcttggcatccttcttaaaaatcaattgactggccaggcacggtggctcatgcctataatcgcagcaatttgggaggccaaggcggatggattatgagatcaggagttcaagacctgcctggccaagagggtgaaaccccatctctactaaaatatacaaaagttagccagccgcggtggtgggcacctgtaatccctgctactcgggaggctgaggcagagaattgcttgaacccaggaggtggaggttgcagtgagctgagatcgtgccactgcactccagcctgggtgacagagtgagactgtgtctcaaagaaaaaaaatattaattgaccataagtatgcacaactgtgaacagtttatgtccagagaagagatttctgtggtgacttttataacttatcaatcatgttttaaataaataaaatagttatgttcatttccatgcaattaaacgtatatgtaagagaaaataatatttttttatttcaataggtttttggggaacaggtggtggttggttacatagataagttctttagtgttgacttctgagattttggtgcacccatcacacgagcagtgtacactgtacctagtgtgtaatcttttatccctcatcccctcccactcttccccccgagttcccagagtctattgtatcattttatgcctttgcatcctcatagcttagctcccacttggtgagaacacacaatgtttggttttccattcctgagttacttcacttagaataatgatctccatttccattcaggttgctgcgaatgccattatttcattcctttttatggctgagtagtattccatggtacatatataccacattaccacattttctttgttcacttgttgattgatgggcatttgggctggttccatatttttgctattgtgaattgtgctgctataaacatgcatgtgcaagtatctttttcatataatgacttcaagaaaagaatatttgatgacaaaaatgaaatgttattactgaaggatggtggaattataggtcaatatttatagtttgtatttatattcaaattaaaaatgagcatgatttactgttataatcagaaaatatcttaaagggttatacataatcatacaaccttttagaaggttgggaaaagagaaaattagtcaagtttgaaatcttaactgtataagtgtaattcaagtcttgatttaatctctaagcataggaaaaaatgtttcttctctagataagtctcttatgtggtttgataagaccccactgtcatatacacattggagagcaggaagaccaactataaaaaatgagaagtttttggctggtttaagtactgacggcttctgggatattcaaacctttaaagttattgaagaagcagtttattttcaccagcacagcattcttgcttgtaaaattgaaatgggtaagtatagtaaaatatagagttttctttcactccagggaaagaatataaggctattagttccaccagtgggaatcatacaatcaaatgcttcctctgtattcagtcctgtgcgaggtgttacagaggttatcgaggaaggaaaagatacgggccctgctgtcaaggttttgaccctaaggagtaaaatgtagttgtggagacagcattaaattccttatcattgtttaatgtaaattggtcttagattaattgatacaggcttaaattgtggggaagtcaaaaccgatacattggaaaggggaataacaaaaaaaaaaggaaaggcttcaagaagaggtgaaacttggttggggtttgaaaaatggatagggtttatataaataagaaagtgtttggggaacgagttttaacattccgtgcaaagtgaatgtctctccaccttgcttaatctttaaataaatctatttttaaatatatgttagttttaattttttcacagcttaaaaactgttaattattaccactgtgccctaaaactgtcattactcccactgtgcccaaagctccctgctcactgggagcccgtaaaggtggagtgctggctagttggctcacttacagcgccgcagtcacttcccaagaccgtgtccaccagcaacctccagggattccttattctaacctactttgagtgcatgtaaacttttgagacattttagaaacttagtctctatccccagtttctaggccttctcccagttccctgtttttccccattcttgctcagcaaagcatctttttctcaatcaagctggtctcttcattgtcccaggcacagtgtatgcccatcctcatacttgcacctttatgttttccttctgccaagaagttttccaatttctttctttctttattttttttacatctttaataaacttttcattttaggatagctttagagttacagaaaagttgcaaagatagtacagagcattcccatctaccctacaatcaatttcccctactgttggcatattactttagtatggtacatttgtcacaactaataaaccaatatttatccattattatctttaactaaagtccacacattattcaaatttctgtagtttttatttaacatactttttctttctaggatcccacctaacctttagttctcctgcctccttaagctcctcttggctggctgttttctcagacttttcttatttttgctggccttgacagttttgaggaacactggtcatgtatttggtagaacgtccctcagtttgggttggcgtatgtttttctcatgattaaactggggttataagtttttgagggaagaccaaagatgtgagggagcattctcacttcacatggacagcatgtactattcatatgacttatcactggccacctggcccaaggtagtgtttgttaggttctctgctgcaaagttacctcttttcctcctttccatactgtcttctttccaaggaagtcactatgttgagtccacacttaatagggtagaaagttatcctccaccttcctatgaggggagtatcgatataaattacttgaaattcttctgcacaggatatttgtctattttctccaatttttattttattttattattttatttatttatttatttttttggagatggagtcttgctctgtcacccaggctggagtgcagtggcgccatctcagctcactgcaacctctgcctcctgggttccagcgattctcctgcctcagcctcccaagtacctgggattacaggcacgccccaccatgcccagctaattttttgtatttttggtagagacggggtttcaccatgttggccaggatggtcttgaactcctgacctcaggtgatccccccgccttggcctcccaaaatgctgggattacaggcgtgagccactgcacctggccccaatttttaaatttattcagtcatttatttataccctcatcattgtagtttttttgttatttgtttgtttgtagcacttccatactttctccttaccttctttttattcttgatttcccccaatcctctagacctagtataggttcattgttatttattttatactttggattataatctaacatactgcattctgtaatattttgcttaagtctttccagctttggcccttgggagctctttcacttggctcccatgtcccttgaaataacctcgtcattgtggctttgctgtttgtgcttgttttaagcacttccttactttctggttcccttatttctttttagtcttaatttcacctaacccttgagacctggtttatcaagtagtcttcctgactcttctcattcaaatgaatctctaccaatttcacataccctactggttaacagttttgccatcatttcagccattgttgtttctgtctccaactaatatatgagcttcttaaatcaaagaaaatgtttatgccttttaaaatatcaatcagagaactttaagagcctaagatatgtgtcataccagtaagaaaaataaaatatacatttgacctcccttattaataagaaacccagttttatttaacttttgaaatgattgcatgttgtctcatccaaaagatgtatttgaaataatttaaattttaatcaccagtgcttttaattattatagttgactacaaagaagaatataatactacactgccacagtttatgccatatgaagatggtatttacagtgttattcaaaaaaaggtaacatggtatgaagcattaaacatgtgttctcaaagtggaggtcacttggcaagcgttcacaaccaaaatggccagctctttctggaagatattgtaaaacgtgatggatttccactatgggttgggctctcaagtcatgatgtaagtcttgcttcgttttccagaaacttttcaaatgtgttattttgagggttagaaatttgagcgtaaagtattaacacaaagtacaacattagatgaagtactgggactccgcttgcatagcatggtgctttcttaccttttacaacacagaacaaatagaaaattttactgtagcatgcactaggacaaatgatcaggccatcccaagggcccagtggatgactatctcaacaacacctctatagcctatttgggacagacaaattggaaagctgataaaaatgaaatagcatagaatcagaaaaccctgagtttgagtaccagtagcagatcttccatttatgtgctgggtgatcattaacctttgcaaccttatttcctcatgtagaaaatcagggtaataataatttcactgagattttaacacaaaagtttatacaaagtaccatctaaaattctccacatggttaggactaataaacgtataccttcttcccacttttcctctagaaaattatactacttaggattaattctgctagtaaagacatctgtgccactatttgaatcatattatttaatcatttatgtacttacagtagggtcttgtgtacaaaaaatggttatctattgagactagagttgtagttttaatttaaataatctttagaacagagtggggaagatttttttttaaaagcatggcaagttaagattataaattcaaggaaaattcaaaaatagtcttcccattttgagtttcttgggaagtgtttctcttttctagctccctactgcttggtgtcctctgtagtgtgaaaaatgtagccagagacacaaaacacaaaactataaaacacagaaaacaatattcagaacaatatgaaggttgggattgtaaatttgtaattatgacaaatggaagccatttgcatgttgtttaatttcgagtgtcacataaactcatccttcaaaaaaatctgaagaccaggtgtagtaactctgtctgtaagtttaaagttctccataaactgtatcagagcaaatgtcccaaatcaatgcatcagaagtaaatcagacctacaataatagtaggttcagacctacaatactgtaagcaaataattaatattccattataatatttcttaaagtatgtatgttgttctttgtattctttttgaagtcaaacatctggattcaggttatctctattgttcttacaacagggaagtgaatcaagttttgaatggtctgatggtagtacatttgactatatcccatggaaaggccaaacatctcctggaaattgtgttctcttggatccaaaaggaacttggaaacatgaaaaatgcaactctgttaaggatggtgctatttgttataaacctacaaaatgtaagacttcaatttcagtaacagtacatttatgaaaatgtgacataatttatgcacataattaaaagctcagtggaatttttatttaaagatttattcacaagggccgggcgcagtggctcgcgcctgtaatcccagcactttgggaggccgaggcgtgcggatcacgaggtcaggagatggagatcatcctggctaacaaggtgaaaccccttctctactaaaaatgcaaaaaaaatagctgggcatggtggcgggcgcctgtagtcccagctagtcaggaggctgaggcgggagaatggcgtgaacccgggaggcggagcttgcagtgagccgagattgcgccactgcagtccagcctgggagacagagcaagactccgtctcaaaaaaaaaaaaaaaaaaaaagatgtattcacaaataatttttgtgaaaataattttgatactttgtaaatggaaacaaatacagtataagcactcagggaatttattcccaatgactttcatttgttctgtcaccaggtaaattctaccctagaatttgtgaattctaatttcacttagcaatgtttttcaaaggctgagatgcttatttcaaaaaagggtcccacaacatataaatttggggaacacctcatgtgatttaccgtattaaagtttctaagagagtttcttttcttttcttttcttttcctttcttttcttttcttttttcttttcttatcttttctttttctttttttttttttgacagggtttcagctctgttgcccagactggagtgcagtggcatgaacatggctcactgcagccttgacctcctaggctcaagcagtcctcccaactcagcctcctgagtagctgggaccacatacacatgccaccacacccagctaatatttaaaatattttgtagagttagggtctcacaatgctgttcaagctggtcttgaactaggatcctaggctcaaacaatcctcctgtttcagcctcccaaagtgctgagagtataggtgtgagctactacgcctggccaaaggttctaagagagtttctgtaataatgaagtctgtttaactttgtgtaaccaagcattttccaaatttatatgatccttaaagtttaagggaagagcctcttccattagaggctggacttagggtcacccctggtggataaagcatgaaccttgaggaagaccacaaaaaaacaaactaccggggactgcagaggcctgcaggacaggctggggggtggtggcattggtttccgaagactctggttctcaatgctcaccatgttttctgctctgaagaatcttgaacggcagattcaacatttggttgaacagattcaggccgaagaaaatgtgaaaactttagagaagcaggttaataaaagaaagggagaatgatataaaggatgaggaatcaaggtacaatcaagaactgacttctcagttgttaggcacagaaaacaaatgtaactctttagaaaaacaattggaatacatgagaaataaggcatgcagaaatagagaaacaggctttataggatagagaatgataagatggccagacataagttctgtgctctaccaggttgaagagtgcctcctccccaaagattcccgtccagtcagaaccttagaatgtgactttactgagaaatagtctttacagatctaggtagttgaggtgaggacatattggataatggtgggccctaaatccaatgactagtgtccttataagagggagatacagacacacagagggaaaaagtccacgtgatgacaaaggctgagattgcagtgacagagtgataaaccaaggactgtcggcaaccaccagaagatgagagggaggcacgagacagattctccaatacagcctccaatgaaaaccaatcctaacaccctcttcaattcagacttctagcctccagaactgtgagagcatacatttctgttgttttaagccaccaattttgtggaatttattatggcagcccaaggaaacgaatacaagggctaactttaaaaactggatcttcaaaaaaaaaaaaaacaaaacagagaataacaggcattagtgaagatgtggagaaaatggaacccttatgcactgctggtaggaatataaaacagtgtaaccactgtgcaaaatggtgtggcaattcttcaaaaacatgtacataagattactatgtgatccagcacttcaggtatatactcaaaacaactgaaagcagggattcaaacaggtgtttgtacaaccatgtcatagcagcataattcataatagccaaaagatgaaagcaacccaagtgtccatggatggacgaatggataagaagccttaaaaaggaaggaaatgctgatgcatgctgcaacacagatgaaccctgaagacagtatgctaagtgaaataagccagtcacaaaaagacaaatactctatgattccatttatatgaggtagtacccagagttgtcaaattcatagagacaggaagtggaatggcagttaccagggactagatggaggggaatatggggagttattgtttagtgggtatagagtttcagttttgcaagataaaaaattttagagatgggtggtggtgatagttgtacaacagagtgaattcatttagcaccacgggactgtacacttaaaaatggttaaggccagatgtggtggttcatgcttgtaatctcagcactttggggggctgagacaggtgggtggcttgagcccaggagttcaagaccagcctgggcaacacagtaagactccgtctctacaaaaacgtgtaaaaattagctggacacagtagtacatgcctgtaatcccagctacttgggaaactgaggcaggaggatctattgcacccaagagtttgagactgcagtgagctatgattgcactactgcattccaacctgggtgacagaataagaccctgtctctaaaaacaaaacaaaaccaaaatggttaagatggtaaattttatgttatgtgtattttaccacaattaaaaaaaatggatcttcttgaacaggaatgtaacacacttaccacgatgcaagcccttacagaaaaaaaaaaaaaaagagttggaagcaaaacttcatgaagaacaagaagaaaaaaaaatgtacgcagcctaagagaccccagttgcagactatactagaaacaaatagaccaaagataaggcagttccttatgttgccagtgcaagaagtaatgttaaaaaaaaaaaggtcaaaccattcagaaaagttccctatcctaatgatgccataataatcaatgttcaacaagttttgcattaacaattgagcccagtgcaacaatgagtaatcagcaatatacctttgcccaaccaactattttcataaggtggtaaaaacaagaacttactagtaacatttcttttcaacagcagcattgatgaggagttgtgagaagttttatagattgtatagatgaatttggcaaatgcattttgatctgcagcagctgggaaacttacccaggagtccaactgctgaactgaagacttagtactcaaattggtgtgttagtgagaagaatggaggcaaaagccaatcaaataaccgaagttcaaaaagatcaagtctggtttctaacagaagatagagaagcagcagaaggaactaagggccactaaagagtctcacagtagccgccattcctctctaatcacagagaccacaaataaggactctgccaagtggagatttggagaaaaaaacagaaaaagcctttacttactgaaggacataaagatcatacagaatgcattacaaaacaatagtttgggttgagattactgactggtaccaggtcagatatttgattcagataagctgtaccgcactaatacgacattgacaatttactttccagttttcatatgctcttcggttggaattaaaaacaggtgttaaagggcacaagctgcattcctcaggctgcttctgttactcagcacaattaaaaatcaatttaaatggaaaccaggggcatttttaagagctaagaagccactcctagtctttttttgtttgagtgatgttgcggtgctgatgtattatgctttgtaaaacaaattagctatttttaaaaaatagttcttcttatgactaagtaaaactagatttatttagattatcaaaataaaaaggaatccaacgggctaggcgctgtggggtcacgcctgtaatcccagcactttgggagcctgaggcaggcaaatcacttgaggtgaggagtttgaaaccagcctggccagcatggtgaaacttcgtctctactaaaaaaaataataataaacaaaaaaaggaatccaaagaaagaaataattttaattattatttcagagtactttcaggtctgcctggcctgtctttacttctttttctagtctgtctttctcattgtttctactttagtccaaatcagtcttagaaagctaaggcactttccacttctatcacctaggttttttaaacggtattccaaaaagttaattaaaatatgtatttatagagtgtgggctgtggctttctctggtatgagttaaatgctactcaaccacaaacgcaacagttccaatcagggacattgaagtagattttgaaaggcagtcttttttttccatgcattgttacaactgtgtctaacatttttatagctaaaaagctgtcccgtcttacatattcatcaagatgtccagcagcaaaagagaatgggtcacggtggatccagtacaagggtcactgttacaagtctgatcaggcattgcacagtttttcagaggccaaaaaattgtgttcaaaacatggtgagttaaaatttgttgattttcttatgactcaataatttttagaaatgtttcttaaggatataatttgaagcaatgattgtatttttgaaaatatttttaaagcactttccatttctaatagcgctataaactaattgcccagtggtagggaaatggttaagtatctgatgacataggaactcaatgaaatattggaatagccattaaaaacgcctgtaatcccagcactttgggaggccaaggcgggcagatcatgaggtcaagagatcaagaccatcctggccaacatggtgaaaccctatctctactaaaaatacaaaaattagctgggtgtggtcgcacacacctgtagtcccagctactcgggaggctgaggcaggagaatcgcttgaacccaggaggcggaggttgcagtgagctgagatggcaccactgcactccagcctgggtgacagagcaagactctatctcaaaaaaaaattatcaatgttaataataagtacatggaaaataataagttggaagaagtagaattttaaagtggtggctgggtgcggtggctcacgcctataatcccagcactttgggaggccgaggtgggaggatcacttgaggttagccattaaagactagcgtgaccaacatggcgagccctcgtctctactaaaaatacaaaacttagctgggcgtggtggcgtgcacctgtaatcccagctacttgggaagctgaggcaggagaatcacatgaaccagggaggtggaggttgcagtgagccaagactgtgccactgcgctccagcctgggcgacagagcaagactccatctcaaaaataaataaataaataaaataaataataaaaataataataaatgtaaaataataaaataaaagtggctaagtgaactgctaagtaaaaatactgacaaatgattggaaacggttttacctatagctagatatgcttagaaaaaggaattaagaggtaaaatttttgtaaagttagctaagtagtaaataaaaattatagttgttccattgcttagttattaatacataagcttagcctcaccagggtaacaaatcaaagtagtatggttgtccatccgttctgcaataggattggccacatcctctgaccaccataaagggcagtgctttttgccttcagatttagctattttagaaagagtagcaatgattggctctttcccgtgacaaatttgatccatagtcaaactgtaaaatgacttctaggggaactacctagagtatttcaaagaccaaaacttgtttacctgcttccttgggtagcaaattagccaggtagatggatggcatttatctaatttattctgataaccgttgtggagacacttgactgattgaaaaatcttgtagttaccgggaacttttgtgtgggaaccattcggttttatacctgaatacacatgatggaaactgttgtaagatatatgtatgttttgaaagtcataaacctttttctcctaaaggagaaaacagaatggtttactgtaaaactaatatgtaggttaagcacttaagacttggaggcatgagggtctgggttcaaatcccagttcccacatatcctagctaagtggcattgggaggttacacaactctttctcttttctcatctgaacagtcagagaggtctcaggggtaggcagttccagggccaaaaaaatattgccagataaatattttgaagaaacacaaaatttctttatacgtgtttggaagtaatttttttgaagtacttataaaattttgacctaaataccagtttttaaaaactgtctctgtgtaaggcttgaatttatcaatgatcttgttaataatatatgtatttttcaaatggctagttgagaataaactacttctctagtttccataaagctaattgagaatgtgttttctttcaacagatcactctgcaactatcgtttccataaaagatgaagatgagaataaatttgtgagcagactgatgagggaaaataataacattaccatgagagtttggcttggattatctcaacattctgttggtaagtgaaataattgtatgtgtagtgtgcaaagagagttctaactcatcctaaataacaagtcgtccttgctaaagaatgttaagtagtggctaattcagatgcctcttctggataaataagctaggtcgctggctgttctggatggttataaattttgaatgaatccatgagttaacttagcaatgacggaaaccactaatgacacagaaaatcctgttaaataaagtggaatctttctagaggcttatttctgggatccttggatcaacatcaggacattttcttctccacaggaatgtctgtgtccccacaaggaacccatgcctgccttctcttagagttctagtgcctgtcaccgcatggatttgcagcttataacttcgttattcagaaagttatcttcttgttattcccttctctctaagaatatttttaccactggttaaaattatgtcttaatagtaatctttaaaaactgtcttagtgttaggttggtgtgaaagtaattgcagcttttgccattacttttgcgccaacctataaaattgcagataattgattcaaagaaaatttgtggaaggattttttaatacgaaatagtagatacagggtttaggtgaacttggaattggtagaaataagagtacaaatatgacagaagataaggtttttcacattttatgcaaagttgaattttaaattattaaaatgtgaattttaaaatgttaagtacttgtcaaaaaataaaaggattccaagttgtccatctaaatgaatcctaaatcgtgtttacactgtcaccacaaggtggtgccacttcagctggaaagcaaaaatggagtcctggtggtggtgtgggagaaaggtggggatggagattcctgcacccttcctcttccaccagcatatctttaatgatatgactttttacaattagagtaggggaaggatatgggtccttagaaatctctccctcacaaaataaatgtgcaagcattctgcactttaacggaaacaccacattctctatctgtgttgtccaatagaactttctacaaagacagaaatgttctatatctgcactgtccaatatagtagtcactggccacatgtggctcttgagcacttgaaatgtgactagtgcaactgaagaactgattttatttttttcatttttaatgcattttattttaacaagtggctctcatattggacagcacagttctgatgagttacatgaacccatgcttgtaacttactagtttagtggcagtagacatagttgtatttaatttctttcttcagaccagtcttggagttggttagatggatcagaagtgacatttgtcaaatgggaaaataaaagtaagagtggtgttggaagatgtagcatgttgatagcttcaaatgaaacttggaaaaaagttgaatgtgaacatggttttggaagagttgtctgcaaagtgcctctgggtaagtatggaacctgtccttaggagactttttgcagaacagtcaggaaataaatgtacaatccaattatgtacaaaattctgtatttagtcttgaagtatttagtccttaaagtatatccaactatcttgattaagtcatagagatttccccctgaaaaatagattacaagggacgataactgcacaagatgtccaggactccagtctacattttatataattctttcctaagaaaaacagaagttgccagggtattagggaagtaatttcttttaaaatgttcttgagatgtattttattctatagtttgattatataaaagcttaaaggtctatttctgcagttaatttgcttcctttcttcctaatcccataaaactcatggttaattttaaaacaatgcaaaactggatttagttattgaaaacattcagggtatctataaaaaatcataatttgaacttacatttcattatgaattgatacataaaattaccattaaaatgttatattaacttcatttctggagaaagagctccaaatttttcacagtaacatttttaaagatcttgcataaaacttttgcttcttgtatataaatattaaagataaaacctcaattctaggtaatcagtatccatgtatacacacactgagacagtaaatagagtgtctactatatgccatgccctgttttgcacactgggatgcacctgagaacaagacagataaggtacctgttctcacagagattacaatctggtgaagaaagataagtaaacaggtcaattttttaaagagaggaaaatatcaaatagttataaactctatgtgatggagactcagtggatagctactctagattaggaaaccagggaagaagcctagaagcaggagacaccgaagctaagatctaaaaaatcaagccaagcaaacttcaagggaaagggcataacagacagaggtaccagttggagcaaagagcctaaggcagaacaagttggctgagcgctcagggaagaactgaaaggtaggcaggtgctagacatacagagctttggaagcaaggcttgagttctggttttattctgagtggaatggaaagcaactggaagatttggggggttgggtgggagcagagttagggtgttgcaaatcaaaagttctacgttggccattttgagttatccatagagggacgagatgtgtagtgtgcatagcaatggtatttaaagtcatggaacagagcgaatccatctgggcagtatgcagataagggtcttggaacagcagctgcactaaatgaactcatctgagagacttaaatcattttgaagcaaataacactttatttagccccaggtaagtcaaaaacaaaaatttatagcttttagcaatttgctatcaaagtaggataatatacaagtagtgatgttcccaaattggtgttaggaagggggaatgtgagaataatcatagcgcattaatgtctttggaagaaaattcctatcacaatgaagaggatttgaatgaataggaaaacacttacatttgaaaagaaatcacttaagtgtttcttttgatctgacgatgagtttgaattctatgttagcgctatgaaacaatcagatttattatgtctgtatacagcttacaggtttacatgtgtgacacaacccataatgtataaaatcaataatgatcacttttgtattctctcctccaacatcaaaccttttcctgttccaggccctgattacacagcaatagctatcatagttgccacactaagtatcttagttctcatgggcggactgatttggttcctcttccaaaggcaccgtttgcacctggcgggtttctcatcagttcgatatgcacaaggagtgaatgaagatgagattatgcttccttctttccatgactaaattcttctaaaagttttctaatttgcactaatgtgttatgagaaattagtcacttaaaatgtcccagtgtcagtatttactctgctccaaagtagaactcttaaatactttttcagttgtttagatcttaggcatgtgctggtatccacagttaattccctgctaaatgccatgtttatcaccctaattaatagaatggaggggactccaaagctggaactgaagtccaaattgtttgtacagtaatatgtttaatgttcattttctctgtatgaatgtgattggtaactaggatatgtatattttaatagaatttttaacaaaacttcttagaaaattaaaataggcatattactaggtgacatgtctactttttaatttttaagagcatccggccaaatgcaaaattagtacctcaaagtaaaaattgaactgtaaactctatcagcattgtttcaaaatagtcatttttagcactggggaaaaataaacaataagacatgcttactttttaatttttatttttttgagactgagtctctctctgttgcccaggctggagtacaatggcgtgatctcggctcactgcaaatctccgcctcccaggttcaagcgattctcctgcctcagcctcctgagtagctgggattacaggcaactgccaccatgcccggctaatttttgtatttttagtagagatggggtttcaccatgttggccaggctggtctcgaactcgtgaccgcaggtgatcctcccgcctcggcctcccaaagtgctgggattacaggcatgagccaccgcgcctggcctctgcttactttttatatagcaaaatgattcctcttggcaagatgtttcttatattattccaaagttatttcataccattattatgtaaatatgaagagtttttttctgtttataattgtttataaaacaatgacttttaaagatttagtgcttaacattttcccaagtgtgggaacattatttttagattgagtaggtaccttgtagcagtgtgctttgcattttctgatgtattacatgactgtttcttttgtaaagagaatcaactaggtatttaagactgataattttacaatttatatgcttcacatagcatgtcaacttttgactaagaattttgttttacttttttaacatgtgttaaacagagaaagggtccatgaaggaaagtgtatgagttgcatttgtaaaaatgagactttttcagtggaactctaaaccttgtgatgactactaacaaatgtaaaattatgagtgattaagaaaacattgctttgtggttatcactttaagttttgacacctagattatagtcttagtaatagcatccactggaaaaggtgaaaatgttttattcggcatttaacttacatttgtactttatttttgtataaaatccatagatttattttacatttagagtatttacactatgataaagttgtaaataattttctaagacagtttttatatagtctacagttgtcctgatttcttattgaatttgttagactagttctcttgtcctgtgatctgtgtacaattttagtcactaagactttcctccaagaactaagccaacttgatgtgaaaagcacagctgtatataatggtgatgtcataataaagttgttttatcttttaagtaaaagtaaaa

SEQ ID NO: 3 - RNA, 6932 nt, Homo sapiens
  source 1..6932: mol_type = other RNA
aggccgcgctcagcaggcggggcgggagccgcgtgcgcccgaggacccggccggaaggcttgcgccagctcaggatgaggacaggctgggcgacccctcgccgcccggcggggctcctcatgctgctcttctggttcttcgatctcgcggagccctctggccgcgcagctaatgaccccttcaccatcgtccatggaaatacgggcaagtgcatcaagccagtgtatggctggatagtagcagacgactgtgatgaaactgaggacaagttatggaagtgggtgtcccagcatcggctctttcatttgcactcccaaaagtgccttggcctcgatattaccaaatcggtaaatgagctgagaatgttcagctgtgactccagtgccatgctgtggtggaaatgtgagcaccactctctgtacggagctgcccggtaccggctggctctgaaggatggacatggcacagcaatctcaaatgcatctgatgtctggaagaaaggaggctcagaggaaagcctttgtgaccagccttatcatgagatctataccagagatgggaactcttatgggagaccttgtgaatttccattcttaattgatgggacctggcatcatgattgcattcttgatgaagatcatagtgggccatggtgtgccaccaccttaaattatgaatatgaccgaaagtggggcatctgcttaaagcctgaaaacggttgtgaagataattgggaaaagaacgagcagtttggaagttgctaccaatttaatactcagacggctctttcttggaaagaagcttatgtttcatgtcagaatcaaggagctgatttactgagcatcaacagtgctgctgaattaacttaccttaaagaaaaagaaggcattgctaagattttctggattggtttaaatcagctatactctgctagaggctgggaatggtcagaccacaaaccattaaactttctcaactgggatccagacaggcccagtgcacctactataggtggctccagctgtgcaagaatggatgctgagtctggtctgtggcagagcttttcctgtgaagctcaactgccctatgtctgcaggaaaccattaaataatacagtggagttaacagatgtctggacatactcagatacccgctgtgatgcaggctggctgccaaataatggattttgctatctgctggtaaatgaaagtaattcctgggataaggcacatgcgaaatgcaaagccttcagtagtgacctaatcagcattcattctctagcagatgtggaggtggttgtcacaaaactccataatgaggatatcaaagaagaagtgtggataggccttaagaacataaacataccaactttatttcagtggtcagatggtactgaagttactctaacatattgggatgagaatgagccaaatgttccctacaataagacgcccaactgtgtttcctacttaggagagctaggtcagtggaaagtccaatcatgtgaggagaaactaaaatatgtatgcaagagaaagggagaaaaactgaatgacgcaagttctgataagatgtgtcctccagatgagggctggaagagacatggagaaacctgttacaagatttatgaggatgaggtcccttttggaacaaactgcaatctgactatcactagcagatttgagcaagaatacctaaatgatttgatgaaaaagtatgataaatctctaagaaaatacttctggactggcctgagagatgtagattcttgtggagagtataactgggcaactgttggtggaagaaggcgggctgtaaccttttccaactggaattttcttgagccagcttccccgggcggctgcgtggctatgtctactggaaagtctgttggaaagtgggaggtgaaggactgcagaagcttcaaagcactttcaatttgcaagaaaatgagtggaccccttgggcctgaagaagcatcccctaagcctgatgacccctgtcctgaaggctggcagagtttccccgcaagtctttcttgttataaggtattccatgcagaaagaattgtaagaaagaggaactgggaagaagctgaacgattctgccaagcccttggagcacacctttctagcttcagccatgtggatgaaataaaggaatttcttcactttttaacggaccagttcagtggccagcattggctgtggattggtttgaataaaaggagcccagatttacaaggatcctggcaatggagtgatcgtacaccagtgtctactattatcatgccaaatgagtttcagcaggattatgacatcagagactgtgctgctgtcaaggtatttcataggccatggcgaagaggctggcatttctatgatgatagagaatttatttatttgaggccttttgcttgtgatacaaaacttgaatgggtgtgccaaattccaaaaggccgtactccaaaaacaccagactggtacaatccagaccgtgctggaattcatggacctccacttataattgaaggaagtgaatattggtttgttgctgatcttcacctaaactatgaagaagccgtcctgtactgtgccagcaatcacagctttcttgcaactataacatcttttgtgggactaaaagccatcaaaaacaaaatagcaaatatatctggtgatggacagaagtggtggataagaattagcgagtggccaatagatgatcattttacatactcacgatatccatggcaccgctttcctgtgacatttggagaggaatgcttgtacatgtctgccaagacttggcttatcgacttaggtaaaccaacagactgtagtaccaagttgcccttcatctgtgaaaaatataatgtttcttcgttagagaaatacagcccagattctgcagctaaagtgcaatgttctgagcaatggattccttttcagaataagtgttttctaaagatcaaacccgtgtctctcacattttctcaagcaagcgatacctgtcactcctatggtggcacccttccttcagtgttgagccagattgaacaagactttattacatccttgcttccggatatggaagctactttatggattggtttgcgctggactgcctatgaaaagataaacaaatggacagataacagagagctgacgtacagtaactttcacccattattggttagtgggaggctgagaataccagaaaatttttttgaggaagagtctcgctaccactgtgccctaatactcaacctccaaaaatcaccgtttactgggacgtggaattttacatcctgcagtgaacgccactttgtgtctctctgtcagaaatattcagaagttaaaagcagacagacgttgcagaatgcttcagaaactgtaaagtatctaaataatctgtacaaaataatcccaaagactctgacttggcacagtgctaaaagggagtgtctgaaaagtaacatgcagctggtgagcatcacggacccttaccagcaggcattcctcagtgtgcaggcgctccttcacaactcttccttatggatcggactcttcagtcaagatgatgaactcaactttggttggtcagatgggaaacgtcttcattttagtcgctgggctgaaactaatgggcaactcgaagactgtgtagtattagacactgatggattctggaaaacagttgattgcaatgacaatcaaccaggtgctatttgctactattcaggaaatgagactgaaaaagaggtcaaaccagttgacagtgttaaatgtccatctcctgttctaaatactccgtggataccatttcagaactgttgctacaatttcataataacaaagaataggcatatggcaacaacacaggatgaagttcatactaaatgccagaaactgaatccaaaatcacatattctgagtattcgagatgaaaaggagaataactttgttcttgagcaactgctgtacttcaattatatggcttcatgggtcatgttaggaataacttatagaaataagtctcttatgtggtttgataagaccccactgtcatatacacattggagagcaggaagaccaactataaaaaatgagaagtttttggctggtttaagtactgacggcttctgggatattcaaacctttaaagttattgaagaagcagtttattttcaccagcacagcattcttgcttgtaaaattgaaatggttgactacaaagaagaatataatactacactgccacagtttatgccatatgaagatggtatttacagtgttattcaaaaaaaggtaacatggtatgaagcattaaacatgtgttctcaaagtggaggtcacttggcaagcgttcacaaccaaaatggccagctctttctggaagatattgtaaaacgtgatggatttccactatgggttgggctctcaagtcatgatggaagtgaatcaagttttgaatggtctgatggtagtacatttgactatatcccatggaaaggccaaacatctcctggaaattgtgttctcttggatccaaaaggaacttggaaacatgaaaaatgcaactctgttaaggatggtgctatttgttataaacctacaaaatctaaaaagctgtcccgtcttacatattcatcaagatgtccagcagcaaaagagaatgggtcacggtggatccagtacaagggtcactgttacaagtctgatcaggcattgcacagtttttcagaggccaaaaaattgtgttcaaaacatgatcactctgcaactatcgtttccataaaagatgaagatgagaataaatttgtgagcagactgatgagggaaaataataacattaccatgagagtttggcttggattatctcaacattctgttgaccagtcttggagttggttagatggatcagaagtgacatttgtcaaatgggaaaataaaagtaagagtggtgttggaagatgtagcatgttgatagcttcaaatgaaacttggaaaaaagttgaatgtgaacatggttttggaagagttgtctgcaaagtgcctctgggccctgattacacagcaatagctatcatagttgccacactaagtatcttagttctcatgggcggactgatttggttcctcttccaaaggcaccgtttgcacctggcgggtttctcatcagttcgatatgcacaaggagtgaatgaagatgagattatgcttccttctttccatgactaaattcttctaaaagttttctaatttgcactaatgtgttatgagaaattagtcacttaaaatgtcccagtgtcagtatttactctgctccaaagtagaactcttaaatactttttcagttgtttagatcttaggcatgtgctggtatccacagttaattccctgctaaatgccatgtttatcaccctaattaatagaatggaggggactccaaagctggaactgaagtccaaattgtttgtacagtaatatgtttaatgttcattttctctgtatgaatgtgattggtaactaggatatgtatattttaatagaatttttaacaaaacttcttagaaaattaaaataggcatattactaggtgacatgtctactttttaatttttaagagcatccggccaaatgcaaaattagtacctcaaagtaaaaattgaactgtaaactctatcagcattgtttcaaaatagtcatttttagcactggggaaaaataaacaataagacatgcttactttttaatttttatttttttgagactgagtctctctctgttgcccaggctggagtacaatggcgtgatctcggctcactgcaaatctccgcctcccaggttcaagcgattctcctgcctcagcctcctgagtagctgggattacaggcaactgccaccatgcccggctaatttttgtatttttagtagagatggggtttcaccatgttggccaggctggtctcgaactcgtgaccgcaggtgatcctcccgcctcggcctcccaaagtgctgggattacaggcatgagccaccgcgcctggcctctgcttactttttatatagcaaaatgattcctcttggcaagatgtttcttatattattccaaagttatttcataccattattatgtaaatatgaagagtttttttctgtttataattgtttataaaacaatgacttttaaagatttagtgcttaacattttcccaagtgtgggaacattatttttagattgagtaggtaccttgtagcagtgtgctttgcattttctgatgtattacatgactgtttcttttgtaaagagaatcaactaggtatttaagactgataattttacaatttatatgcttcacatagcatgtcaacttttgactaagaattttgttttacttttttaacatgtgttaaacagagaaagggtccatgaaggaaagtgtatgagttgcatttgtaaaaatgagactttttcagtggaactctaaaccttgtgatgactactaacaaatgtaaaattatgagtgattaagaaaacattgctttgtggttatcactttaagttttgacacctagattatagtcttagtaatagcatccactggaaaaggtgaaaatgttttattcggcatttaacttacatttgtactttatttttgtataaaatccatagatttattttacatttagagtatttacactatgataaagttgtaaataattttctaagacagtttttatatagtctacagttgtcctgatttcttattgaatttgttagactagttctcttgtcctgtgatctgtgtacaattttagtcactaagactttcctccaagaactaagccaacttgatgtgaaaagcacagctgtatataatggtgatgtcataataaagttgttttatcttttaagtaaaagtaaaa

SEQ ID NO: 4 - RNA, 5650 nt, Homo sapiens
  source 1..5650: mol_type = other RNA
ccggccggaaggcttgcgccagctcaggatgaggacaggctgggcgacccctcgccgcccggcggggctcctcatgctgctcttctggttcttcgatctcgcggagccctctggccgcgcagctaatgaccccttcaccatcgtccatggaaatacgggcaagtgcatcaagccagtgtatggctggatagtagcagacgactgtgatgaaactgaggacaagttatggaagtgggtgtcccagcatcggctctttcatttgcactcccaaaagtgccttggcctcgatattaccaaatcggtaaatgagctgagaatgttcagctgtgactccagtgccatgctgtggtggaaatgtgagcaccactctctgtacggagctgcccggtaccggctggctctgaaggatggacatggcacagcaatctcaaatgcatctgatgtctggaagaaaggaggctcagaggaaagcctttgtgaccagccttatcatgagatctataccagagatgggaactcttatgggagaccttgtgaatttccattcttaattgatgggacctggcatcatgattgcattcttgatgaagatcatagtgggccatggtgtgccaccaccttaaattatgaatatgaccgaaagtggggcatctgcttaaagcctgaaaacggttgtgaagataattgggaaaagaacgagcagtttggaagttgctaccaatttaatactcagacggctctttcttggaaagaagcttatgtttcatgtcagaatcaaggagctgatttactgagcatcaacagtgctgctgaattaacttaccttaaagaaaaagaaggcattgctaagattttctggattggtttaaatcagctatactctgctagaggctgggaatggtcagaccacaaaccattaaactttctcaactgggatccagacaggcccagtgcacctactataggtggctccagctgtgcaagaatggatgctgagtctggtctgtggcagagcttttcctgtgaagctcaactgccctatgtctgcaggaaaccattaaataatacagtggagttaacagatgtctggacatactcagatacccgctgtgatgcaggctggctgccaaataatggattttgctatctgctggtaaatgaaagtaattcctgggataaggcacatgcgaaatgcaaagccttcagtagtgacctaatcagcattcattctctagcagatgtggaggtggttgtcacaaaactccataatgaggatatcaaagaagaagtgtggataggccttaagaacataaacataccaactttatttcagtggtcagatggtactgaagttactctaacatattgggatgagaatgagccaaatgttccctacaataagacgcccaactgtgtttcctacttaggagagctaggtcagtggaaagtccaatcatgtgaggagaaactaaaatatgtatgcaagagaaagggagaaaaactgaatgacgcaagttctgataagatgtgtcctccagatgagggctggaagagacatggagaaacctgttacaagatttatgaggatgaggtcccttttggaacaaactgcaatctgactatcactagcagatttgagcaagaatacctaaatgatttgatgaaaaagtatgataaatctctaagaaaatacttctggactggcctgagagatgtagattcttgtggagagtataactgggcaactgttggtggaagaaggcgggctgtaaccttttccaactggaattttcttgagccagcttccccgggcggctgcgtggctatgtctactggaaagtctgttggaaagtgggaggtgaaggactgcagaagcttcaaagcactttcaatttgcaagaaaatgagtggaccccttgggcctgaagaagcatcccctaagcctgatgacccctgtcctgaaggctggcagagtttccccgcaagtctttcttgttataaggtattccatgcagaaagaattgtaagaaagaggaactgggaagaagctgaacgattctgccaagcccttggagcacacctttctagcttcagccatgtggatgaaataaaggaatttcttcactttttaacggaccagttcagtggccagcattggctgtggattggtttgaataaaaggagcccagatttacaaggatcctggcaatggagtgatcgtacaccagtgtctactattatcatgccaaatgagtttcagcaggattatgacatcagagactgtgctgctgtcaaggtatttcataggccatggcgaagaggctggcatttctatgatgatagagaatttatttatttgaggccttttgcttgtgatacaaaacttgaatgggtgtgccaaattccaaaaggccgtactccaaaaacaccagactggtacaatccagaccgtgctggaattcatggacctccacttataattgaaggaagtgaatattggtttgttgctgatcttcacctaaactatgaagaagccgtcctgtactgtgccagcaatcacagctttcttgcaactataacatcttttgtgggactaaaagccatcaaaaacaaaatagcaaatatatctggtgatggacagaagtggtggataagaattagcgagtggccaatagatgatcattttacatactcacgatatccatggcaccgctttcctgtgacatttggagaggaatgcttgtacatgtctgccaagacttggcttatcgacttaggtaaaccaacagactgtagtaccaagttgcccttcatctgtgaaaaatataatgtttcttcgttagagaaatacagcccagattctgcagctaaagtgcaatgttctgagcaatggattccttttcagaataagtgttttctaaagatcaaacccgtgtctctcacattttctcaagcaagcgatacctgtcactcctatggtggcacccttccttcagtgttgagccagattgaacaagactttattacatccttgcttccggatatggaagctactttatggattggtttgcgctggactgcctatgaaaagataaacaaatggacagataacagagagctgacgtacagtaactttcacccattattggttagtgggaggctgagaataccagaaaatttttttgaggaagagtctcgctaccactgtgccctaatactcaacctccaaaaatcaccgtttactgggacgtggaattttacatcctgcagtgaacgccactttgtgtctctctgtcagaaatattcagaagttaaaagcagacagacgttgcagaatgcttcagaaactgtaaagtatctaaataatctgtacaaaataatcccaaagactctgacttggcacagtgctaaaagggagtgtctgaaaagtaacatgcagctggtgagcatcacggacccttaccagcaggcattcctcagtgtgcaggcgctccttcacaactcttccttatggatcggactcttcagtcaagatgatgaactcaactttggttggtcagatgggaaacgtcttcattttagtcgctgggctgaaactaatgggcaactcgaagactgtgtagtattagacactgatggattctggaaaacagttgattgcaatgacaatcaaccaggtgctatttgctactattcaggaaatgagactgaaaaagaggtcaaaccagttgacagtgttaaatgtccatctcctgttctaaatactccgtggataccatttcagaactgttgctacaatttcataataacaaagaataggcatatggcaacaacacaggatgaagttcatactaaatgccagaaactgaatccaaaatcacatattctgagtattcgagatgaaaaggagaataactttgttcttgagcaactgctgtacttcaattatatggcttcatgggtcatgttaggaataacttatagaaataagtctcttatgtggtttgataagaccccactgtcatatacacattggagagcaggaagaccaactataaaaaatgagaagtttttggctggtttaagtactgacggcttctgggatattcaaacctttaaagttattgaagaagcagtttattttcaccagcacagcattcttgcttgtaaaattgaaatggttgactacaaagaagaatataatactacactgccacagtttatgccatatgaagatggtatttacagtgttattcaaaaaaaggtaacatggtatgaagcattaaacatgtgttctcaaagtggaggtcacttggcaagcgttcacaaccaaaatggccagctctttctggaagatattgtaaaacgtgatggatttccactatgggttgggctctcaagtcatgatggaagtgaatcaagttttgaatggtctgatggtagtacatttgactatatcccatggaaaggccaaacatctcctggaaattgtgttctcttggatccaaaaggaacttggaaacatgaaaaatgcaactctgttaaggatggtgctatttgttataaacctacaaaatctaaaaagctgtcccgtcttacatattcatcaagatgtccagcagcaaaagagaatgggtcacggtggatccagtacaagggtcactgttacaagtctgatcaggcattgcacagtttttcagaggccaaaaaattgtgttcaaaacatgatcactctgcaactatcgtttccataaaagatgaagatgagaataaatttgtgagcagactgatgagggaaaataataacattaccatgagagtttggcttggattatctcaacattctgttgaccagtcttggagttggttagatggatcagaagtgacatttgtcaaatgggaaaataaaagtaagagtggtgttggaagatgtagcatgttgatagcttcaaatgaaacttggaaaaaagttgaatgtgaacatggttttggaagagttgtctgcaaagtgcctctggactgtccttcatctacttggattcagttccaagacagttgttacatttttctccaagaagccatcaaagtagaaagcatagaggatgtcagaaatcagtgtactgaccatggagcggacatgataagcatacataatgaagaagaaaatgcttttatactggatactttgaaaaagcaatggaaaggcccagatgatatcctactaggcatgttttatgacacagatgatgcgagtttcaagtggtttgataattcaaatatgacatttgataagtggacagaccaagatgatgatgaggatttagttgacacctgtgcttttctgcacatcaagacaggtgaatggaaaaaaggaaattgtgaagtttcttctgtggaaggaacactatgcaaaacagctatcccatacaaaaggaaatatttatcagataaccacattttaatatcagcattggtgattgctagcacggtaattttgacagttttgggagcaatcatttggttcctgtacaaaaaacattctgattctcgtttcaccacagttttttcaaccgcaccccaatcaccttataatgaagactgtgttttggtagttggagaagaaaatgaatatcctgttcaatttgactaa

SEQ ID NO: 5 - RNA, 5482 nt, Homo sapiens
  source 1..5482: mol_type = other RNA
ccggccggaaggcttgcgccagctcaggatgaggacaggctgggcgacccctcgccgcccggcggggctcctcatgctgctcttctggttcttcgatctcgcggagccctctggccgcgcagctaatgaccccttcaccatcgtccatggaaatacgggcaagtgcatcaagccagtgtatggctggatagtagcagacgactgtgatgaaactgaggacaagttatggaagtgggtgtcccagcatcggctctttcatttgcactcccaaaagtgccttggcctcgatattaccaaatcggtaaatgagctgagaatgttcagctgtgactccagtgccatgctgtggtggaaatgtgagcaccactctctgtacggagctgcccggtaccggctggctctgaaggatggacatggcacagcaatctcaaatgcatctgatgtctggaagaaaggaggctcagaggaaagcctttgtgaccagccttatcatgagatctataccagagatgggaactcttatgggagaccttgtgaatttccattcttaattgatgggacctggcatcatgattgcattcttgatgaagatcatagtgggccatggtgtgccaccaccttaaattatgaatatgaccgaaagtggggcatctgcttaaagcctgaaaacggttgtgaagataattgggaaaagaacgagcagtttggaagttgctaccaatttaatactcagacggctctttcttggaaagaagcttatgtttcatgtcagaatcaaggagctgatttactgagcatcaacagtgctgctgaattaacttaccttaaagaaaaagaaggcattgctaagattttctggattggtttaaatcagctatactctgctagaggctgggaatggtcagaccacaaaccattaaactttctcaactgggatccagacaggcccagtgcacctactataggtggctccagctgtgcaagaatggatgctgagtctggtctgtggcagagcttttcctgtgaagctcaactgccctatgtctgcaggaaaccattaaataatacagtggagttaacagatgtctggacatactcagatacccgctgtgatgcaggctggctgccaaataatggattttgctatctgctggtaaatgaaagtaattcctgggataaggcacatgcgaaatgcaaagccttcagtagtgacctaatcagcattcattctctagcagatgtggaggtggttgtcacaaaactccataatgaggatatcaaagaagaagtgtggataggccttaagaacataaacataccaactttatttcagtggtcagatggtactgaagttactctaacatattgggatgagaatgagccaaatgttccctacaataagacgcccaactgtgtttcctacttaggagagctaggtcagtggaaagtccaatcatgtgaggagaaactaaaatatgtatgcaagagaaagggagaaaaactgaatgacgcaagttctgataagatgtgtcctccagatgagggctggaagagacatggagaaacctgttacaagatttatgaggatgaggtcccttttggaacaaactgcaatctgactatcactagcagatttgagcaagaatacctaaatgatttgatgaaaaagtatgataaatctctaagaaaatacttctggactggcctgagagatgtagattcttgtggagagtataactgggcaactgttggtggaagaaggcgggctgtaaccttttccaactggaattttcttgagccagcttccccgggcggctgcgtggctatgtctactggaaagtctgttggaaagtgggaggtgaaggactgcagaagcttcaaagcactttcaatttgcaagaaaatgagtggaccccttgggcctgaagaagcatcccctaagcctgatgacccctgtcctgaaggctggcagagtttccccgcaagtctttcttgttataaggtattccatgcagaaagaattgtaagaaagaggaactgggaagaagctgaacgattctgccaagcccttggagcacacctttctagcttcagccatgtggatgaaataaaggaatttcttcactttttaacggaccagttcagtggccagcattggctgtggattggtttgaataaaaggagcccagatttacaaggatcctggcaatggagtgatcgtacaccagtgtctactattatcatgccaaatgagtttcagcaggattatgacatcagagactgtgctgctgtcaaggtatttcataggccatggcgaagaggctggcatttctatgatgatagagaatttatttatttgaggccttttgcttgtgatacaaaacttgaatgggtgtgccaaattccaaaaggccgtactccaaaaacaccagactggtacaatccagaccgtgctggaattcatggacctccacttataattgaaggaagtgaatattggtttgttgctgatcttcacctaaactatgaagaagccgtcctgtactgtgccagcaatcacagctttcttgcaactataacatcttttgtgggactaaaagccatcaaaaacaaaatagcaaatatatctggtgatggacagaagtggtggataagaattagcgagtggccaatagatgatcattttacatactcacgatatccatggcaccgctttcctgtgacatttggagaggaatgcttgtacatgtctgccaagacttggcttatcgacttaggtaaaccaacagactgtagtaccaagttgcccttcatctgtgaaaaatataatgtttcttcgttagagaaatacagcccagattctgcagctaaagtgcaatgttctgagcaatggattccttttcagaataagtgttttctaaagatcaaacccgtgtctctcacattttctcaagcaagcgatacctgtcactcctatggtggcacccttccttcagtgttgagccagattgaacaagactttattacatccttgcttccggatatggaagctactttatggattggtttgcgctggactgcctatgaaaagataaacaaatggacagataacagagagctgacgtacagtaactttcacccattattggttagtgggaggctgagaataccagaaaatttttttgaggaagagtctcgctaccactgtgccctaatactcaacctccaaaaatcaccgtttactgggacgtggaattttacatcctgcagtgaacgccactttgtgtctctctgtcagaaatattcagaagttaaaagcagacagacgttgcagaatgcttcagaaactgtaaagtatctaaataatctgtacaaaataatcccaaagactctgacttggcacagtgctaaaagggagtgtctgaaaagtaacatgcagctggtgagcatcacggacccttaccagcaggcattcctcagtgtgcaggcgctccttcacaactcttccttatggatcggactcttcagtcaagatgatgaactcaactttggttggtcagatgggaaacgtcttcattttagtcgctgggctgaaactaatgggcaactcgaagactgtgtagtattagacactgatggattctggaaaacagttgattgcaatgacaatcaaccaggtgctatttgctactattcaggaaatgagactgaaaaagaggtcaaaccagttgacagtgttaaatgtccatctcctgttctaaatactccgtggataccatttcagaactgttgctacaatttcataataacaaagaataggcatatggcaacaacacaggatgaagttcatactaaatgccagaaactgaatccaaaatcacatattctgagtattcgagatgaaaaggagaataactttgttcttgagcaactgctgtacttcaattatatggcttcatgggtcatgttaggaataacttatagaaataagtctcttatgtggtttgataagaccccactgtcatatacacattggagagcaggaagaccaactataaaaaatgagaagtttttggctggtttaagtactgacggcttctgggatattcaaacctttaaagttattgaagaagcagtttattttcaccagcacagcattcttgcttgtaaaattgaaatggttgactacaaagaagaatataatactacactgccacagtttatgccatatgaagatggtatttacagtgttattcaaaaaaaggtaacatggtatgaagcattaaacatgtgttctcaaagtggaggtcacttggcaagcgttcacaaccaaaatggccagctctttctggaagatattgtaaaacgtgatggatttccactatgggttgggctctcaagtcatgatggaagtgaatcaagttttgaatggtctgatggtagtacatttgactatatcccatggaaaggccaaacatctcctggaaattgtgttctcttggatccaaaaggaacttggaaacatgaaaaatgcaactctgttaaggatggtgctatttgttataaacctacaaaatctaaaaagctgtcccgtcttacatattcatcaagatgtccagcagcaaaagagaatgggtcacggtggatccagtacaagggtcactgttacaagtctgatcaggcattgcacagtttttcagaggccaaaaaattgtgttcaaaacatgatcactctgcaactatcgtttccataaaagatgaagatgagaataaatttgtgagcagactgatgagggaaaataataacattaccatgagagtttggcttggattatctcaacattctgttgactgtccttcatctacttggattcagttccaagacagttgttacatttttctccaagaagccatcaaagtagaaagcatagaggatgtcagaaatcagtgtactgaccatggagcggacatgataagcatacataatgaagaagaaaatgcttttatactggatactttgaaaaagcaatggaaaggcccagatgatatcctactaggcatgttttatgacacagatgatgcgagtttcaagtggtttgataattcaaatatgacatttgataagtggacagaccaagatgatgatgaggatttagttgacacctgtgcttttctgcacatcaagacaggtgaatggaaaaaaggaaattgtgaagtttcttctgtggaaggaacactatgcaaaacagctatcccatacaaaaggaaatatttatcagataaccacattttaatatcagcattggtgattgctagcacggtaattttgacagttttgggagcaatcatttggttcctgtacaaaaaacattctgattctcgtttcaccacagttttttcaaccgcaccccaatcaccttataatgaagactgtgttttggtagttggagaagaaaatgaatatcctgttcaatttgactaa

SEQ ID NO: 6 - RNA, 8919 nt, Homo sapiens
  source 1..8919: mol_type = other RNA
aggccgcgctcagcaggcggggcgggagccgcgtgcgcccgaggacccggccggaaggcttgcgccagctcaggatgaggacaggctgggcgacccctcgccgcccggcggggctcctcatgctgctcttctggttcttcgatctcgcggagccctctggccgcgcagctaatgaccccttcaccatcgtccatggaaatacgggcaagtgcatcaagccagtgtatggctggatagtagcagacgactgtgatgaaactgaggacaagttatggaagtgggtgtcccagcatcggctctttcatttgcactcccaaaagtgccttggcctcgatattaccaaatcggtaaatgagctgagaatgttcagctgtgactccagtgccatgctgtggtggaaatgtgagcaccactctctgtacggagctgcccggtaccggctggctctgaaggatggacatggcacagcaatctcaaatgcatctgatgtctggaagaaaggaggctcagaggaaagcctttgtgaccagccttatcatgagatctataccagagatgggaactcttatgggagaccttgtgaatttccattcttaattgatgggacctggcatcatgattgcattcttgatgaagatcatagtgggccatggtgtgccaccaccttaaattatgaatatgaccgaaagtggggcatctgcttaaagcctgaaaacggttgtgaagataattgggaaaagaacgagcagtttggaagttgctaccaatttaatactcagacggctctttcttggaaagaagcttatgtttcatgtcagaatcaaggagctgatttactgagcatcaacagtgctgctgaattaacttaccttaaagaaaaagaaggcattgctaagattttctggattggtttaaatcagctatactctgctagaggctgggaatggtcagaccacaaaccattaaactttctcaactgggatccagacaggcccagtgcacctactataggtggctccagctgtgcaagaatggatgctgagtctggtctgtggcagagcttttcctgtgaagctcaactgccctatgtctgcaggaaaccattaaataatacagtggagttaacagatgtctggacatactcagatacccgctgtgatgcaggctggctgccaaataatggattttgctatctgctggtaaatgaaagtaattcctgggataaggcacatgcgaaatgcaaagccttcagtagtgacctaatcagcattcattctctagcagatgtggaggtggttgtcacaaaactccataatgaggatatcaaagaagaagtgtggataggccttaagaacataaacataccaactttatttcagtggtcagatggtactgaagttactctaacatattgggatgagaatgagccaaatgttccctacaataagacgcccaactgtgtttcctacttaggagagctaggtcagtggaaagtccaatcatgtgaggagaaactaaaatatgtatgcaagagaaagggagaaaaactgaatgacgcaagttctgataagatgtgtcctccagatgagggctggaagagacatggagaaacctgttacaagatttatgaggatgaggtcccttttggaacaaactgcaatctgactatcactagcagatttgagcaagaatacctaaatgatttgatgaaaaagtatgataaatctctaagaaaatacttctggactggcctgagagatgtagattcttgtggagagtataactgggcaactgttggtggaagaaggcgggctgtaaccttttccaactggaattttcttgagccagcttccccgggcggctgcgtggctatgtctactggaaagtctgttggaaagtgggaggtgaaggactgcagaagcttcaaagcactttcaatttgcaagaaaatgagtggaccccttgggcctgaagaagcatcccctaagcctgatgacccctgtcctgaaggctggcagagtttccccgcaagtctttcttgttataaggtattccatgcagaaagaattgtaagaaagaggaactgggaagaagctgaacgattctgccaagcccttggagcacacctttctagcttcagccatgtggatgaaataaaggaatttcttcactttttaacggaccagttcagtggccagcattggctgtggattggtttgaataaaaggagcccagatttacaaggatcctggcaatggagtgatcgtacaccagtgtctactattatcatgccaaatgagtttcagcaggattatgacatcagagactgtgctgctgtcaaggtatttcataggccatggcgaagaggctggcatttctatgatgatagagaatttatttatttgaggccttttgcttgtgatacaaaacttgaatgggtgtgccaaattccaaaaggccgtactccaaaaacaccagactggtacaatccagaccgtgctggaattcatggacctccacttataattgaaggaagtgaatattggtttgttgctgatcttcacctaaactatgaagaagccgtcctgtactgtgccagcaatcacagctttcttgcaactataacatcttttgtgggactaaaagccatcaaaaacaaaatagcaaatatatctggtgatggacagaagtggtggataagaattagcgagtggccaatagatgatcattttacatactcacgatatccatggcaccgctttcctgtgacatttggagaggaatgcttgtacatgtctgccaagacttggcttatcgacttaggtaaaccaacagactgtagtaccaagttgcccttcatctgtgaaaaatataatgtttcttcgttagagaaatacagcccagattctgcagctaaagtgcaatgttctgagcaatggattccttttcagaataagtgttttctaaagatcaaacccgtgtctctcacattttctcaagcaagcgatacctgtcactcctatggtggcacccttccttcagtgttgagccagattgaacaagactttattacatccttgcttccggatatggaagctactttatggattggtttgcgctggactgcctatgaaaagataaacaaatggacagataacagagagctgacgtacagtaactttcacccattattggttagtgggaggctgagaataccagaaaatttttttgaggaagagtctcgctaccactgtgccctaatactcaacctccaaaaatcaccgtttactgggacgtggaattttacatcctgcagtgaacgccactttgtgtctctctgtcagaaatattcagaagttaaaagcagacagacgttgcagaatgcttcagaaactgtaaagtatctaaataatctgtacaaaataatcccaaagactctgacttggcacagtgctaaaagggagtgtctgaaaagtaacatgcagctggtgagcatcacggacccttaccagcaggcattcctcagtgtgcaggcgctccttcacaactcttccttatggatcggactcttcagtcaagatgatgaactcaactttggttggtcagatgggaaacgtcttcattttagtcgctgggctgaaactaatgggcaactcgaagactgtgtagtattagacactgatggattctggaaaacagttgattgcaatgacaatcaaccaggtgctatttgctactattcaggaaatgagactgaaaaagaggtcaaaccagttgacagtgttaaatgtccatctcctgttctaaatactccgtggataccatttcagaactgttgctacaatttcataataacaaagaataggcatatggcaacaacacaggatgaagttcatactaaatgccagaaactgaatccaaaatcacatattctgagtattcgagatgaaaaggagaataactttgttcttgagcaactgctgtacttcaattatatggcttcatgggtcatgttaggaataacttatagaaataagtctcttatgtggtttgataagaccccactgtcatatacacattggagagcaggaagaccaactataaaaaatgagaagtttttggctggtttaagtactgacggcttctgggatattcaaacctttaaagttattgaagaagcagtttattttcaccagcacagcattcttgcttgtaaaattgaaatggttgactacaaagaagaatataatactacactgccacagtttatgccatatgaagatggtatttacagtgttattcaaaaaaaggtaacatggtatgaagcattaaacatgtgttctcaaagtggaggtcacttggcaagcgttcacaaccaaaatggccagctctttctggaagatattgtaaaacgtgatggatttccactatgggttgggctctcaagtcatgatggaagtgaatcaagttttgaatggtctgatggtagtacatttgactatatcccatggaaaggccaaacatctcctggaaattgtgttctcttggatccaaaaggaacttggaaacatgaaaaatgcaactctgttaaggatggtgctatttgttataaacctacaaaatctaaaaagctgtcccgtcttacatattcatcaagatgtccagcagcaaaagagaatgggtcacggtggatccagtacaagggtcactgttacaagtctgatcaggcattgcacagtttttcagaggccaaaaaattgtgttcaaaacatgatcactctgcaactatcgtttccataaaagatgaagatgagaataaatttgtgagcagactgatgagggaaaataataacattaccatgagagtttggcttggattatctcaacattctgttgaccagtcttggagttggttagatggatcagaagtgacatttgtcaaatgggaaaataaaagtaagagtggtgttggaagatgtagcatgttgatagcttcaaatgaaacttggaaaaaagttgaatgtgaacatggttttggaagagttgtctgcaaagtgcctctggactgtccttcatctacttggattcagttccaagacagttgttacatttttctccaagaagccatcaaagtagaaagcatagaggatgtcagaaatcagtgtactgaccatggagcggacatgataagcatacataatgaagaagaaaatgcttttatactggatactttgaaaaagcaatggaaaggcccagatgatatcctactaggcatgttttatgacacagatgatgcgagtttcaagtggtttgataattcaaatatgacatttgataagtggacagaccaagatgatgatgaggatttagttgacacctgtgcttttctgcacatcaagacaggtgaatggaaaaaaggaaattgtgaagtttcttctgtggaaggaacactatgcaaaacagctatcccatacaaaaggaaatatttatcagataaccacattttaatatcagcattggtgattgctagcacggtaattttgacagttttgggagcaatcatttggttcctgtacaaaaaacattctgattctcgtttcaccacagttttttcaaccgcaccccaatcaccttataatgaagactgtgttttggtagttggagaagaaaatgaatatcctgttcaatttgactaagtttttggtaatcttgcactaagacatcaacaaaatgccctggcagagataacttgggaaagattttaatataaaacttgacattggatattagagctttaatggtattccttattccagtaacatttttatgtactcatctgctgtgaaaagtctttaggttcattaaaaaaacaggttttagaaatgatcttagatctaatatagtgattttaagcatcccgtcaaaggcagaatctgtcacttgaatgaaggaaagcttaaagcccaagcagataaaaataaaagcccagcctatttgtcttgcctgctgtatcttccctatttagttgacccactttagtttatatgtttattagtaaacatgaaatggggaataagtgattttaagtacatcccatacatttaaatatctttgataattgttatttttttggcagataattcctctagaatgtgtatctttttatgatttagatgaagaaaattttacaacttttaacaccccacaccaattttagtttcattacttttacacacaccattttatcacaaatgactcaagttttaatgaatgtttataaattatttgaaacaaaatatgatcgctgtgtccaggatggcatagagaaagctggcaattaggttaacacttacatattatagtgcccctttaaggatttctctcttgccaccataccttttgtactttcccctatacaagatgtatctcattctcctcaagcatttataaatttttccttcaatgacatgaaaactgtgcaagcaaaaaccgaagaaaaacacttaagtacaactgtagtgacagtgatcaaagttttcagtgcatttattgtacattttaagaaaaaggtgaaaatcatttggggagtaaaaaaatgaaaaagctgaaacgagtaattttcctcaccatcaataaaccaaaaacaggaaagataaagaatgtataaatttcacgtaaattagtcacgtatcacttatcaatggggatacgttctaagaaatgcatagttagggaatcttgtgtgaaaatcagcttgtatttacacaaacccagatggtagagcctattttgtcccaaacctacacagcatgttactgtgctgaatactgcagacaattgtaacacaatatttgtgtatctaaatatagaaaaggtacagtaaaaatatggtctactaaggaaacactgttctatatgtggtccattactgactgaagtatactgtctagaagtctgaggctcaaagaaaagtaatccctcttctgaatccacaccccatcaattatcttactttcttctggggagatagatagatatactatctcactagcttgactaatggcaacaaagttccagcttgtgtagtctctttttattgaccacatgaatcgaaaacactcatcacaattaatggcactatcattaatgagacatgagtaactaaaaagtgatagaaaactattaacagtgcggctacatggtactgaaaatgcaggcattacaccagctgttacacaagcacaagcatgctctgtaagagctttacatttctgagattttgtatagtgattgagatgtctattttattattgatagactattactaatgtcaatattgaacactaccctggaattcctgcctggttttcctacccaaattgtaccactccttgaagaactacaggcacagtaaaaaaaatatggcgtattatgtgaactaaaagagttctaaaggagttcttaaaggagtggtagaatttgggtaggaaagtgattaagtccaacttaaaaccaacagtctcaaacgtctacaactacaatgtccaatgagccactagccacatgaggctatttaagtaaatttagtttaaaatccagttttcgaattacattagccacattgtcaagtgttcaaatcacaggtggttagtggctactgtactgggcaacatacattatagaacattttcattataggaagttttattgggcagtgctgctcttaaatcctaccttccactcaactcccatacaactttcttttgtacattttgatactttctacctaatggcagctcttccaaaatagctgctttaaactctgatttaattttcaatatttggtttcatttttcaacaggccaagaggcctctggtaatgaagtgctatatatatatatatgatggagtctcactgtgctgcccaggctacagtgcagtggctcgatcttggctctctccaatctccgccttgcaggttttcaagcaattctcctgcctcagcctccttagtagctgggaccacagacatctgtcaccacacccagctaactttttgtatttttggtagagacggggtttcgccatattgactgggctggtctcaaactcctgacctcaagtgatccacccaccttggtctcccaaagtgctgggattacatgcgtgagccaccacacttggcctacattttttctttatataccagaacatctataacaggcaccttatctactcattagtgaagagataattggattacacaggcaggcttgtttactacatccagaatgtagaaactgctttcttcaacatcttggttctagctagtaataacaatataattctttggcagatattcagaataacattttaaactacattttcttagaaaattgcattcttgtagtgagcagtgtatggtctcttttgttcagaatttaaaactgataaccaatgaaagccttttctcttattcctctaccgtcatttacatgataatctgaagctaatatgacaatatttaaatactaagtggtactagggaactacaagaatactgtaaagcttaagccattgttatcactgtcatttagcatttaataacaaaactatacagaattatgtgcataccaatgaatgttttgtaccatctagttaaattttttaaataaagttttatgggttaagcagaagacaactgtcatactgaattttattaaaagtatatatacttcaaattcaaagcatcccttaggacccacagaatatattaaaactaccacccttaaattttatatttttgctttaagacagacaatgcaaaggtaactggcaagaggtgagcaaatgttttagaacatttatattattgcttaaaatgagatttgaaattgtaataaaattcttggttatgaa

SEQ ID NO: 7 - RNA, 8751 nt, Homo sapiens
  source 1..8751: mol_type = other RNA
aggccgcgctcagcaggcggggcgggagccgcgtgcgcccgaggacccggccggaaggcttgcgccagctcaggatgaggacaggctgggcgacccctcgccgcccggcggggctcctcatgctgctcttctggttcttcgatctcgcggagccctctggccgcgcagctaatgaccccttcaccatcgtccatggaaatacgggcaagtgcatcaagccagtgtatggctggatagtagcagacgactgtgatgaaactgaggacaagttatggaagtgggtgtcccagcatcggctctttcatttgcactcccaaaagtgccttggcctcgatattaccaaatcggtaaatgagctgagaatgttcagctgtgactccagtgccatgctgtggtggaaatgtgagcaccactctctgtacggagctgcccggtaccggctggctctgaaggatggacatggcacagcaatctcaaatgcatctgatgtctggaagaaaggaggctcagaggaaagcctttgtgaccagccttatcatgagatctataccagagatgggaactcttatgggagaccttgtgaatttccattcttaattgatgggacctggcatcatgattgcattcttgatgaagatcatagtgggccatggtgtgccaccaccttaaattatgaatatgaccgaaagtggggcatctgcttaaagcctgaaaacggttgtgaagataattgggaaaagaacgagcagtttggaagttgctaccaatttaatactcagacggctctttcttggaaagaagcttatgtttcatgtcagaatcaaggagctgatttactgagcatcaacagtgctgctgaattaacttaccttaaagaaaaagaaggcattgctaagattttctggattggtttaaatcagctatactctgctagaggctgggaatggtcagaccacaaaccattaaactttctcaactgggatccagacaggcccagtgcacctactataggtggctccagctgtgcaagaatggatgctgagtctggtctgtggcagagcttttcctgtgaagctcaactgccctatgtctgcaggaaaccattaaataatacagtggagttaacagatgtctggacatactcagatacccgctgtgatgcaggctggctgccaaataatggattttgctatctgctggtaaatgaaagtaattcctgggataaggcacatgcgaaatgcaaagccttcagtagtgacctaatcagcattcattctctagcagatgtggaggtggttgtcacaaaactccataatgaggatatcaaagaagaagtgtggataggccttaagaacataaacataccaactttatttcagtggtcagatggtactgaagttactctaacatattgggatgagaatgagccaaatgttccctacaataagacgcccaactgtgtttcctacttaggagagctaggtcagtggaaagtccaatcatgtgaggagaaactaaaatatgtatgcaagagaaagggagaaaaactgaatgacgcaagttctgataagatgtgtcctccagatgagggctggaagagacatggagaaacctgttacaagatttatgaggatgaggtcccttttggaacaaactgcaatctgactatcactagcagatttgagcaagaatacctaaatgatttgatgaaaaagtatgataaatctctaagaaaatacttctggactggcctgagagatgtagattcttgtggagagtataactgggcaactgttggtggaagaaggcgggctgtaaccttttccaactggaattttcttgagccagcttccccgggcggctgcgtggctatgtctactggaaagtctgttggaaagtgggaggtgaaggactgcagaagcttcaaagcactttcaatttgcaagaaaatgagtggaccccttgggcctgaagaagcatcccctaagcctgatgacccctgtcctgaaggctggcagagtttccccgcaagtctttcttgttataaggtattccatgcagaaagaattgtaagaaagaggaactgggaagaagctgaacgattctgccaagcccttggagcacacctttctagcttcagccatgtggatgaaataaaggaatttcttcactttttaacggaccagttcagtggccagcattggctgtggattggtttgaataaaaggagcccagatttacaaggatcctggcaatggagtgatcgtacaccagtgtctactattatcatgccaaatgagtttcagcaggattatgacatcagagactgtgctgctgtcaaggtatttcataggccatggcgaagaggctggcatttctatgatgatagagaatttatttatttgaggccttttgcttgtgatacaaaacttgaatgggtgtgccaaattccaaaaggccgtactccaaaaacaccagactggtacaatccagaccgtgctggaattcatggacctccacttataattgaaggaagtgaatattggtttgttgctgatcttcacctaaactatgaagaagccgtcctgtactgtgccagcaatcacagctttcttgcaactataacatcttttgtgggactaaaagccatcaaaaacaaaatagcaaatatatctggtgatggacagaagtggtggataagaattagcgagtggccaatagatgatcattttacatactcacgatatccatggcaccgctttcctgtgacatttggagaggaatgcttgtacatgtctgccaagacttggcttatcgacttaggtaaaccaacagactgtagtaccaagttgcccttcatctgtgaaaaatataatgtttcttcgttagagaaatacagcccagattctgcagctaaagtgcaatgttctgagcaatggattccttttcagaataagtgttttctaaagatcaaacccgtgtctctcacattttctcaagcaagcgatacctgtcactcctatggtggcacccttccttcagtgttgagccagattgaacaagactttattacatccttgcttccggatatggaagctactttatggattggtttgcgctggactgcctatgaaaagataaacaaatggacagataacagagagctgacgtacagtaactttcacccattattggttagtgggaggctgagaataccagaaaatttttttgaggaagagtctcgctaccactgtgccctaatactcaacctccaaaaatcaccgtttactgggacgtggaattttacatcctgcagtgaacgccactttgtgtctctctgtcagaaatattcagaagttaaaagcagacagacgttgcagaatgcttcagaaactgtaaagtatctaaataatctgtacaaaataatcccaaagactctgacttggcacagtgctaaaagggagtgtctgaaaagtaacatgcagctggtgagcatcacggacccttaccagcaggcattcctcagtgtgcaggcgctccttcacaactcttccttatggatcggactcttcagtcaagatgatgaactcaactttggttggtcagatgggaaacgtcttcattttagtcgctgggctgaaactaatgggcaactcgaagactgtgtagtattagacactgatggattctggaaaacagttgattgcaatgacaatcaaccaggtgctatttgctactattcaggaaatgagactgaaaaagaggtcaaaccagttgacagtgttaaatgtccatctcctgttctaaatactccgtggataccatttcagaactgttgctacaatttcataataacaaagaataggcatatggcaacaacacaggatgaagttcatactaaatgccagaaactgaatccaaaatcacatattctgagtattcgagatgaaaaggagaataactttgttcttgagcaactgctgtacttcaattatatggcttcatgggtcatgttaggaataacttatagaaataagtctcttatgtggtttgataagaccccactgtcatatacacattggagagcaggaagaccaactataaaaaatgagaagtttttggctggtttaagtactgacggcttctgggatattcaaacctttaaagttattgaagaagcagtttattttcaccagcacagcattcttgcttgtaaaattgaaatggttgactacaaagaagaatataatactacactgccacagtttatgccatatgaagatggtatttacagtgttattcaaaaaaaggtaacatggtatgaagcattaaacatgtgttctcaaagtggaggtcacttggcaagcgttcacaaccaaaatggccagctctttctggaagatattgtaaaacgtgatggatttccactatgggttgggctctcaagtcatgatggaagtgaatcaagttttgaatggtctgatggtagtacatttgactatatcccatggaaaggccaaacatctcctggaaattgtgttctcttggatccaaaaggaacttggaaacatgaaaaatgcaactctgttaaggatggtgctatttgttataaacctacaaaatctaaaaagctgtcccgtcttacatattcatcaagatgtccagcagcaaaagagaatgggtcacggtggatccagtacaagggtcactgttacaagtctgatcaggcattgcacagtttttcagaggccaaaaaattgtgttcaaaacatgatcactctgcaactatcgtttccataaaagatgaagatgagaataaatttgtgagcagactgatgagggaaaataataacattaccatgagagtttggcttggattatctcaacattctgttgactgtccttcatctacttggattcagttccaagacagttgttacatttttctccaagaagccatcaaagtagaaagcatagaggatgtcagaaatcagtgtactgaccatggagcggacatgataagcatacataatgaagaagaaaatgcttttatactggatactttgaaaaagcaatggaaaggcccagatgatatcctactaggcatgttttatgacacagatgatgcgagtttcaagtggtttgataattcaaatatgacatttgataagtggacagaccaagatgatgatgaggatttagttgacacctgtgcttttctgcacatcaagacaggtgaatggaaaaaaggaaattgtgaagtttcttctgtggaaggaacactatgcaaaacagctatcccatacaaaaggaaatatttatcagataaccacattttaatatcagcattggtgattgctagcacggtaattttgacagttttgggagcaatcatttggttcctgtacaaaaaacattctgattctcgtttcaccacagttttttcaaccgcaccccaatcaccttataatgaagactgtgttttggtagttggagaagaaaatgaatatcctgttcaatttgactaagtttttggtaatcttgcactaagacatcaacaaaatgccctggcagagataacttgggaaagattttaatataaaacttgacattggatattagagctttaatggtattccttattccagtaacatttttatgtactcatctgctgtgaaaagtctttaggttcattaaaaaaacaggttttagaaatgatcttagatctaatatagtgattttaagcatcccgtcaaaggcagaatctgtcacttgaatgaaggaaagcttaaagcccaagcagataaaaataaaagcccagcctatttgtcttgcctgctgtatcttccctatttagttgacccactttagtttatatgtttattagtaaacatgaaatggggaataagtgattttaagtacatcccatacatttaaatatctttgataattgttatttttttggcagataattcctctagaatgtgtatctttttatgatttagatgaagaaaattttacaacttttaacaccccacaccaattttagtttcattacttttacacacaccattttatcacaaatgactcaagttttaatgaatgtttataaattatttgaaacaaaatatgatcgctgtgtccaggatggcatagagaaagctggcaattaggttaacacttacatattatagtgcccctttaaggatttctctcttgccaccataccttttgtactttcccctatacaagatgtatctcattctcctcaagcatttataaatttttccttcaatgacatgaaaactgtgcaagcaaaaaccgaagaaaaacacttaagtacaactgtagtgacagtgatcaaagttttcagtgcatttattgtacattttaagaaaaaggtgaaaatcatttggggagtaaaaaaatgaaaaagctgaaacgagtaattttcctcaccatcaataaaccaaaaacaggaaagataaagaatgtataaatttcacgtaaattagtcacgtatcacttatcaatggggatacgttctaagaaatgcatagttagggaatcttgtgtgaaaatcagcttgtatttacacaaacccagatggtagagcctattttgtcccaaacctacacagcatgttactgtgctgaatactgcagacaattgtaacacaatatttgtgtatctaaatatagaaaaggtacagtaaaaatatggtctactaaggaaacactgttctatatgtggtccattactgactgaagtatactgtctagaagtctgaggctcaaagaaaagtaatccctcttctgaatccacaccccatcaattatcttactttcttctggggagatagatagatatactatctcactagcttgactaatggcaacaaagttccagcttgtgtagtctctttttattgaccacatgaatcgaaaacactcatcacaattaatggcactatcattaatgagacatgagtaactaaaaagtgatagaaaactattaacagtgcggctacatggtactgaaaatgcaggcattacaccagctgttacacaagcacaagcatgctctgtaagagctttacatttctgagattttgtatagtgattgagatgtctattttattattgatagactattactaatgtcaatattgaacactaccctggaattcctgcctggttttcctacccaaattgtaccactccttgaagaactacaggcacagtaaaaaaaatatggcgtattatgtgaactaaaagagttctaaaggagttcttaaaggagtggtagaatttgggtaggaaagtgattaagtccaacttaaaaccaacagtctcaaacgtctacaactacaatgtccaatgagccactagccacatgaggctatttaagtaaatttagtttaaaatccagttttcgaattacattagccacattgtcaagtgttcaaatcacaggtggttagtggctactgtactgggcaacatacattatagaacattttcattataggaagttttattgggcagtgctgctcttaaatcctaccttccactcaactcccatacaactttcttttgtacattttgatactttctacctaatggcagctcttccaaaatagctgctttaaactctgatttaattttcaatatttggtttcatttttcaacaggccaagaggcctctggtaatgaagtgctatatatatatatatgatggagtctcactgtgctgcccaggctacagtgcagtggctcgatcttggctctctccaatctccgccttgcaggttttcaagcaattctcctgcctcagcctccttagtagctgggaccacagacatctgtcaccacacccagctaactttttgtatttttggtagagacggggtttcgccatattgactgggctggtctcaaactcctgacctcaagtgatccacccaccttggtctcccaaagtgctgggattacatgcgtgagccaccacacttggcctacattttttctttatataccagaacatctataacaggcaccttatctactcattagtgaagagataattggattacacaggcaggcttgtttactacatccagaatgtagaaactgctttcttcaacatcttggttctagctagtaataacaatataattctttggcagatattcagaataacattttaaactacattttcttagaaaattgcattcttgtagtgagcagtgtatggtctcttttgttcagaatttaaaactgataaccaatgaaagccttttctcttattcctctaccgtcatttacatgataatctgaagctaatatgacaatatttaaatactaagtggtactagggaactacaagaatactgtaaagcttaagccattgttatcactgtcatttagcatttaataacaaaactatacagaattatgtgcataccaatgaatgttttgtaccatctagttaaattttttaaataaagttttatgggttaagcagaagacaactgtcatactgaattttattaaaagtatatatacttcaaattcaaagcatcccttaggacccacagaatatattaaaactaccacccttaaattttatatttttgctttaagacagacaatgcaaaggtaactggcaagaggtgagcaaatgttttagaacatttatattattgcttaaaatgagatttgaaattgtaataaaattcttggttatgaa

SEQ ID NO: 8 - RNA, 5622 nt, Homo sapiens
  source 1..5622: mol_type = other RNA
atgaggacaggctgggcgacccctcgccgcccggcggggctcctcatgctgctcttctggttcttcgatctcgcggagccctctggccgcgcagctaatgaccccttcaccatcgtccatggaaatacgggcaagtgcatcaagccagtgtatggctggatagtagcagacgactgtgatgaaactgaggacaagttatggaagtgggtgtcccagcatcggctctttcatttgcactcccaaaagtgccttggcctcgatattaccaaatcggtaaatgagctgagaatgttcagctgtgactccagtgccatgctgtggtggaaatgtgagcaccactctctgtacggagctgcccggtaccggctggctctgaaggatggacatggcacagcaatctcaaatgcatctgatgtctggaagaaaggaggctcagaggaaagcctttgtgaccagccttatcatgagatctataccagagatgggaactcttatgggagaccttgtgaatttccattcttaattgatgggacctggcatcatgattgcattcttgatgaagatcatagtgggccatggtgtgccaccaccttaaattatgaatatgaccgaaagtggggcatctgcttaaagcctgaaaacggttgtgaagataattgggaaaagaacgagcagtttggaagttgctaccaatttaatactcagacggctctttcttggaaagaagcttatgtttcatgtcagaatcaaggagctgatttactgagcatcaacagtgctgctgaattaacttaccttaaagaaaaagaaggcattgctaagattttctggattggtttaaatcagctatactctgctagaggctgggaatggtcagaccacaaaccattaaactttctcaactgggatccagacaggcccagtgcacctactataggtggctccagctgtgcaagaatggatgctgagtctggtctgtggcagagcttttcctgtgaagctcaactgccctatgtctgcaggaaaccattaaataatacagtggagttaacagatgtctggacatactcagatacccgctgtgatgcaggctggctgccaaataatggattttgctatctgctggtaaatgaaagtaattcctgggataaggcacatgcgaaatgcaaagccttcagtagtgacctaatcagcattcattctctagcagatgtggaggtggttgtcacaaaactccataatgaggatatcaaagaagaagtgtggataggccttaagaacataaacataccaactttatttcagtggtcagatggtactgaagttactctaacatattgggatgagaatgagccaaatgttccctacaataagacgcccaactgtgtttcctacttaggagagctaggtcagtggaaagtccaatcatgtgaggagaaactaaaatatgtatgcaagagaaagggagaaaaactgaatgacgcaagttctgataagatgtgtcctccagatgagggctggaagagacatggagaaacctgttacaagatttatgaggatgaggtcccttttggaacaaactgcaatctgactatcactagcagatttgagcaagaatacctaaatgatttgatgaaaaagtatgataaatctctaagaaaatacttctggactggcctgagagatgtagattcttgtggagagtataactgggcaactgttggtggaagaaggcgggctgtaaccttttccaactggaattttcttgagccagcttccccgggcggctgcgtggctatgtctactggaaagtctgttggaaagtgggaggtgaaggactgcagaagcttcaaagcactttcaatttgcaagaaaatgagtggaccccttgggcctgaagaagcatcccctaagcctgatgacccctgtcctgaaggctggcagagtttccccgcaagtctttcttgttataaggtattccatgcagaaagaattgtaagaaagaggaactgggaagaagctgaacgattctgccaagcccttggagcacacctttctagcttcagccatgtggatgaaataaaggaatttcttcactttttaacggaccagttcagtggccagcattggctgtggattggtttgaataaaaggagcccagatttacaaggatcctggcaatggagtgatcgtacaccagtgtctactattatcatgccaaatgagtttcagcaggattatgacatcagagactgtgctgctgtcaaggtatttcataggccatggcgaagaggctggcatttctatgatgatagagaatttatttatttgaggccttttgcttgtgatacaaaacttgaatgggtgtgccaaattccaaaaggccgtactccaaaaacaccagactggtacaatccagaccgtgctggaattcatggacctccacttataattgaaggaagtgaatattggtttgttgctgatcttcacctaaactatgaagaagccgtcctgtactgtgccagcaatcacagctttcttgcgactataacatcttttgtgggactaaaagccatcaaaaacaaaatagcaaatatatctggtgatggacagaagtggtggataagaattagcgagtggccaatagatgatcattttacatactcacgatatccatggcaccgctttcctgtgacatttggagaggaatgcttgtacatgtctgccaagacttggcttatcgacttaggtaaaccaacagactgtagtaccaagttgcccttcatctgtgaaaaatataatgtttcttcgttagagaaatacagcccagattctgcagctaaagtgcaatgttctgagcaatggattccttttcagaataagtgttttctaaagatcaaacccgtgtctctcacattttctcaagcaagcgatacctgtcactcctatggtggcacccttccttcagtgttgagccagattgaacaagactttattacatccttgcttccggatatggaagctactttatggattggtttgcgctggactgcctatgaaaagataaacaaatggacagataacagagagctgacgtacagtaactttcacccattattggttagtgggaggctgagaataccagaaaatttttttgaggaagagtctcgctaccactgtgccctaatactcaacctccaaaaatcaccgtttactgggacgtggaattttacatcctgcagtgaacgccactttgtgtctctctgtcagaaatattcagaagttaaaagcagacagacgttgcagaatgcttcagaaactgtaaagtatctaaataatctgtacaaaataatcccaaagactctgacttggcacagtgctaaaagggagtgtctgaaaagtaacatgcagctggtgagcatcacggacccttaccagcaggcattcctcagtgtgcaggcgctccttcacaactcttccttatggatcggactcttcagtcaagatgatgaactcaactttggttggtcagatgggaaacgtcttcattttagtcgctgggctgaaactaatgggcaactcgaagactgtgtagtattagacactgatggattctggaaaacagttgattgcaatgacaatcaaccaggtgctatttgctactattcaggaaatgagactgaaaaagaggtcaaaccagttgacagtgttaaatgtccatctcctgttctaaatactccgtggataccatttcagaactgttgctacaatttcataataacaaagaataggcatatggcaacaacacaggatgaagttcatactaaatgccagaaactgaatccaaaatcacatattctgagtattcgagatgaaaaggagaataactttgttcttgagcaactgctgtacttcaattatatggcttcatgggtcatgttaggaataacttatagaaataattctcttatgtggtttgataagaccccactgtcatatacacattggagagcaggaagaccaactataaaaaatgagaagtttttggctggtttaagtactgacggcttctgggatattcaaacctttaaagttattgaagaagcagtttattttcaccagcacagcattcttgcttgtaaaattgaaatggttgactacaaagaagaacataatactacactgccacagtttatgccatatgaagatggtatttacagtgttattcaaaaaaaggtaacatggtatgaagcattaaacatgtgttctcaaagtggaggtcacttggcaagcgttcacaaccaaaatggccagctctttctggaagatattgtaaaacgtgatggatttccactatgggttgggctctcaagtcatgatggaagtgaatcaagttttgaatggtctgatggtagtacatttgactatatcccatggaaaggccaaacatctcctggaaattgtgttctcttggatccaaaaggaacttggaaacatgaaaaatgcaactctgttaaggatggtgctatttgttataaacctacaaaatctaaaaagctgtcccgtcttacatattcatcaagatgtccagcagcaaaagagaatgggtcacggtggatccagtacaagggtcactgttacaagtctgatcaggcattgcacagtttttcagaggccaaaaaattgtgttcaaaacatgatcactctgcaactatcgtttccataaaagatgaagatgagaataaatttgtgagcagactgatgagggaaaataataacattaccatgagagtttggcttggattatctcaacattctgttgaccagtcttggagttggttagatggatcagaagtgacatttgtcaaatgggaaaataaaagtaagagtggtgttggaagatgtagcatgttgatagcttcaaatgaaacttggaaaaaagttgaatgtgaacatggttttggaagagttgtctgcaaagtgcctctggactgtccttcatctacttggattcagttccaagacagttgttacatttttctccaagaagccatcaaagtagaaagcatagaggatgtcagaaatcagtgtactgaccatggagcggacatgataagcatacataatgaagaagaaaatgcttttatactggatactttgaaaaagcaatggaaaggcccagatgatatcctactaggcatgttttatgacacagatgatgcgagtttcaagtggtttgataattcaaatatgacatttgataagtggacagaccaagatgatgatgaggatttagttgacacctgtgcttttctgcacatcaagacaggtgaatggaaaaaaggaaattgtgaagtttcttctgtggaaggaacactatgcaaaacagctatcccatacaaaaggaaatatttatcagataaccacattttaatatcagcattggtgattgctagcacggtaattttgacagttttgggagcaatcatttggttcctgtacaaaaaacattctgattctcgtttcaccacagttttttcaaccgcaccccaatcaccttataatgaagactgtgttttggtagttggagaagaaaatgaatatcctgttcaatttgactaa

SEQ ID NO: 9 - RNA, 5454 nt, Homo sapiens
  source 1..5454: mol_type = other RNA
atgaggacaggctgggcgacccctcgccgcccggcggggctcctcatgctgctcttctggttcttcgatctcgcggagccctctggccgcgcagctaatgaccccttcaccatcgtccatggaaatacgggcaagtgcatcaagccagtgtatggctggatagtagcagacgactgtgatgaaactgaggacaagttatggaagtgggtgtcccagcatcggctctttcatttgcactcccaaaagtgccttggcctcgatattaccaaatcggtaaatgagctgagaatgttcagctgtgactccagtgccatgctgtggtggaaatgtgagcaccactctctgtacggagctgcccggtaccggctggctctgaaggatggacatggcacagcaatctcaaatgcatctgatgtctggaagaaaggaggctcagaggaaagcctttgtgaccagccttatcatgagatctataccagagatgggaactcttatgggagaccttgtgaatttccattcttaattgatgggacctggcatcatgattgcattcttgatgaagatcatagtgggccatggtgtgccaccaccttaaattatgaatatgaccgaaagtggggcatctgcttaaagcctgaaaacggttgtgaagataattgggaaaagaacgagcagtttggaagttgctaccaatttaatactcagacggctctttcttggaaagaagcttatgtttcatgtcagaatcaaggagctgatttactgagcatcaacagtgctgctgaattaacttaccttaaagaaaaagaaggcattgctaagattttctggattggtttaaatcagctatactctgctagaggctgggaatggtcagaccacaaaccattaaactttctcaactgggatccagacaggcccagtgcacctactataggtggctccagctgtgcaagaatggatgctgagtctggtctgtggcagagcttttcctgtgaagctcaactgccctatgtctgcaggaaaccattaaataatacagtggagttaacagatgtctggacatactcagatacccgctgtgatgcaggctggctgccaaataatggattttgctatctgctggtaaatgaaagtaattcctgggataaggcacatgcgaaatgcaaagccttcagtagtgacctaatcagcattcattctctagcagatgtggaggtggttgtcacaaaactccataatgaggatatcaaagaagaagtgtggataggccttaagaacataaacataccaactttatttcagtggtcagatggtactgaagttactctaacatattgggatgagaatgagccaaatgttccctacaataagacgcccaactgtgtttcctacttaggagagctaggtcagtggaaagtccaatcatgtgaggagaaactaaaatatgtatgcaagagaaagggagaaaaactgaatgacgcaagttctgataagatgtgtcctccagatgagggctggaagagacatggagaaacctgttacaagatttatgaggatgaggtcccttttggaacaaactgcaatctgactatcactagcagatttgagcaagaatacctaaatgatttgatgaaaaagtatgataaatctctaagaaaatacttctggactggcctgagagatgtagattcttgtggagagtataactgggcaactgttggtggaagaaggcgggctgtaaccttttccaactggaattttcttgagccagcttccccgggcggctgcgtggctatgtctactggaaagtctgttggaaagtgggaggtgaaggactgcagaagcttcaaagcactttcaatttgcaagaaaatgagtggaccccttgggcctgaagaagcatcccctaagcctgatgacccctgtcctgaaggctggcagagtttccccgcaagtctttcttgttataaggtattccatgcagaaagaattgtaagaaagaggaactgggaagaagctgaacgattctgccaagcccttggagcacacctttctagcttcagccatgtggatgaaataaaggaatttcttcactttttaacggaccagttcagtggccagcattggctgtggattggtttgaataaaaggagcccagatttacaaggatcctggcaatggagtgatcgtacaccagtgtctactattatcatgccaaatgagtttcagcaggattatgacatcagagactgtgctgctgtcaaggtatttcataggccatggcgaagaggctggcatttctatgatgatagagaatttatttatttgaggccttttgcttgtgatacaaaacttgaatgggtgtgccaaattccaaaaggccgtactccaaaaacaccagactggtacaatccagaccgtgctggaattcatggacctccacttataattgaaggaagtgaatattggtttgttgctgatcttcacctaaactatgaagaagccgtcctgtactgtgccagcaatcacagctttcttgcgactataacatcttttgtgggactaaaagccatcaaaaacaaaatagcaaatatatctggtgatggacagaagtggtggataagaattagcgagtggccaatagatgatcattttacatactcacgatatccatggcaccgctttcctgtgacatttggagaggaatgcttgtacatgtctgccaagacttggcttatcgacttaggtaaaccaacagactgtagtaccaagttgcccttcatctgtgaaaaatataatgtttcttcgttagagaaatacagcccagattctgcagctaaagtgcaatgttctgagcaatggattccttttcagaataagtgttttctaaagatcaaacccgtgtctctcacattttctcaagcaagcgatacctgtcactcctatggtggcacccttccttcagtgttgagccagattgaacaagactttattacatccttgcttccggatatggaagctactttatggattggtttgcgctggactgcctatgaaaagataaacaaatggacagataacagagagctgacgtacagtaactttcacccattattggttagtgggaggctgagaataccagaaaatttttttgaggaagagtctcgctaccactgtgccctaatactcaacctccaaaaatcaccgtttactgggacgtggaattttacatcctgcagtgaacgccactttgtgtctctctgtcagaaatattcagaagttaaaagcagacagacgttgcagaatgcttcagaaactgtaaagtatctaaataatctgtacaaaataatcccaaagactctgacttggcacagtgctaaaagggagtgtctgaaaagtaacatgcagctggtgagcatcacggacccttaccagcaggcattcctcagtgtgcaggcgctccttcacaactcttccttatggatcggactcttcagtcaagatgatgaactcaactttggttggtcagatgggaaacgtcttcattttagtcgctgggctgaaactaatgggcaactcgaagactgtgtagtattagacactgatggattctggaaaacagttgattgcaatgacaatcaaccaggtgctatttgctactattcaggaaatgagactgaaaaagaggtcaaaccagttgacagtgttaaatgtccatctcctgttctaaatactccgtggataccatttcagaactgttgctacaatttcataataacaaagaataggcatatggcaacaacacaggatgaagttcatactaaatgccagaaactgaatccaaaatcacatattctgagtattcgagatgaaaaggagaataactttgttcttgagcaactgctgtacttcaattatatggcttcatgggtcatgttaggaataacttatagaaataattctcttatgtggtttgataagaccccactgtcatatacacattggagagcaggaagaccaactataaaaaatgagaagtttttggctggtttaagtactgacggcttctgggatattcaaacctttaaagttattgaagaagcagtttattttcaccagcacagcattcttgcttgtaaaattgaaatggttgactacaaagaagaacataatactacactgccacagtttatgccatatgaagatggtatttacagtgttattcaaaaaaaggtaacatggtatgaagcattaaacatgtgttctcaaagtggaggtcacttggcaagcgttcacaaccaaaatggccagctctttctggaagatattgtaaaacgtgatggatttccactatgggttgggctctcaagtcatgatggaagtgaatcaagttttgaatggtctgatggtagtacatttgactatatcccatggaaaggccaaacatctcctggaaattgtgttctcttggatccaaaaggaacttggaaacatgaaaaatgcaactctgttaaggatggtgctatttgttataaacctacaaaatctaaaaagctgtcccgtcttacatattcatcaagatgtccagcagcaaaagagaatgggtcacggtggatccagtacaagggtcactgttacaagtctgatcaggcattgcacagtttttcagaggccaaaaaattgtgttcaaaacatgatcactctgcaactatcgtttccataaaagatgaagatgagaataaatttgtgagcagactgatgagggaaaataataacattaccatgagagtttggcttggattatctcaacattctgttgactgtccttcatctacttggattcagttccaagacagttgttacatttttctccaagaagccatcaaagtagaaagcatagaggatgtcagaaatcagtgtactgaccatggagcggacatgataagcatacataatgaagaagaaaatgcttttatactggatactttgaaaaagcaatggaaaggcccagatgatatcctactaggcatgttttatgacacagatgatgcgagtttcaagtggtttgataattcaaatatgacatttgataagtggacagaccaagatgatgatgaggatttagttgacacctgtgcttttctgcacatcaagacaggtgaatggaaaaaaggaaattgtgaagtttcttctgtggaaggaacactatgcaaaacagctatcccatacaaaaggaaatatttatcagataaccacattttaatatcagcattggtgattgctagcacggtaattttgacagttttgggagcaatcatttggttcctgtacaaaaaacattctgattctcgtttcaccacagttttttcaaccgcaccccaatcaccttataatgaagactgtgttttggtagttggagaagaaaatgaatatcctgttcaatttgactaa

SEQ ID NO: 10 - RNA, 5713 nt, Homo sapiens
  source 1..5713: mol_type = other RNA
gataaggcacatgcgaaatgcaaagccttcagtagtgacctaatcagcattcattctctagcagatgtggaggtggttgtcacaaaactccataatgaggatatcaaagaagaagtgtggataggccttaagaacataaacataccaactttatttcagtggtcagatggtactgaagttactctaacatattgggatgagaatgagccaaatgttccctacaataagacgcccaactgtgtttcctacttaggagagctaggtcagtggaaagtccaatcatgtgaggagaaactaaaatatgtatgcaagagaaagggagaaaaactgaatgacgcaagttctgataagatgtgtcctccagatgagggctggaagagacatggagaaacctgttacaagatttatgaggatgaggtcccttttggaacaaactgcaatctgactatcactagcagatttgagcaagaatacctaaatgatttgatgaaaaagtatgataaatctctaagaaaatacttctggactggcctgagagatgtagattcttgtggagagtataactgggcaactgttggtggaagaaggcgggctgtaaccttttccaactggaattttcttgagccagcttccccgggcggctgcgtggctatgtctactggaaagtctgttggaaagtgggaggtgaaggactgcagaagcttcaaagcactttcaatttgcaagaaaatgagtggaccccttgggcctgaagaagcatcccctaagcctgatgacccctgtcctgaaggctggcagagtttccccgcaagtctttcttgttataaggtattccatgcagaaagaattgtaagaaagaggaactgggaagaagctgaacgattctgccaagcccttggagcacacctttctagcttcagccatgtggatgaaataaaggaatttcttcactttttaacggaccagttcagtggccagcattggctgtggattggtttgaataaaaggagcccagatttacaaggatcctggcaatggagtgatcgtacaccagtgtctactattatcatgccaaatgagtttcagcaggattatgacatcagagactgtgctgctgtcaaggtatttcataggccatggcgaagaggctggcatttctatgatgatagagaatttatttatttgaggccttttgcttgtgatacaaaacttgaatgggtgtgccaaattccaaaaggccgtactccaaaaacaccagactggtacaatccagagcgtgctggaattcatggacctccacttataattgaaggaagtgaatattggtttgttgctgatcttcacctaaactatgaagaagccgtcctgtactgtgccagcaatcacagctttcttgcaactataacatcttttgtgggactaaaagccatcaaaaacaaaatagcaaatatatctggtgatggacagaagtggtggataagaattagcgagtggccaatagatgatcattttacatactcacgatatccatggcaccgctttcctgtgacatttggagaggaatgcttgtacatgtctgccaagacttggcttatcgacttaggtaaaccaacagactgtagtaccaagttgcccttcatctgtgaaaaatataatgtttcttcgttagagaaatacagcccagattctgcagctaaagtgcaatgttctgagcaatggattccttttcagaataagtgttttctaaagatcaaacccgtgtctctcacattttctcaagcaagcgatacctgtcactcctatggtggcacccttccttcagtgttgagccagattgaacaagactttattacatccttgcttccggatatggaagctactttatggattggtttgcgctggactgcctatgaaaagataaacaaatggacagataacagagagctgacgtacagtaactttcacccattattggttagtgggaggctgagaataccagaaaatttttttgaggaagagtctcgctaccactgtgccctaatactcaacctccaaaaatcaccgtttactgggacgtggaattttacatcctgcagtgaacgccactttgtgtctctctgtcagaaatattcagaagttaaaagcagacagacgttgcagaatgcttcagaaactgtaaagtatctaaataatctgtacaaaataatcccaaagactctgacttggcacagtgctaaaagggagtgtctgaaaagtaacatgcagctggtgagcatcacggacccttaccagcaggcattcctcagtgtgcaggcgctccttcacaactcttccttatggatcggactcttcagtcaagatgatgaactcaactttggttggtcagatgggaaacgtcttcattttagtcgctgggctgaaactaatgggcaactcgaagactgtgtagtattagacactgatggattctggaaaacagttgattgcaatgacaatcaaccaggtgctatttgctactattcaggaaatgagactgaaaaagaggtcaaaccagttgacagtgttaaatgtccatctcctgttctaaatactccgtggataccatttcagaactgttgctacaatttcataataacaaagaataggcatatggcaacaacacaggatgaagttcatactaaatgccagaaactgaatccaaaatcacatattctgagtattcgagatgaaaaggagaataactttgttcttgagcaactgctgtacttcaattatatggcttcatgggtcatgttaggaataacttatagaaataattctcttatgtggtttgataagaccccactgtcatatacacattggagagcaggaagaccaactataaaaaatgagaagtttttggctggtttaagtactgacggcttctgggatattcaaacctttaaagttattgaagaagcagtttattttcaccagcacagcattcttgcttgtaaaattgaaatggttgactacaaagaagaatataatactacactgccacagtttatgccatatgaagatggtatttacagtgttattcaaaaaaaggtaacatggtatgaagcattaaacatgtgttctcaaagtggaggtcacttggcaagcgttcacaaccaaaatggccagctctttctggaagatattgtaaaacgtgatggatttccactatgggttgggctctcaagtcatgatggaagtgaatcaagttttgaatggtctgatggtagtacatttgactatatcccatggaaaggccaaacatctcctggaaattgtgttctcttggatccaaaaggaacttggaaacatgaaaaatgcaactctgttaaggatggtgctatttgttataaacctacaaaatctaaaaagctgtcccgtcttacatattcatcaagatgtccagcagcaaaagagaatgggtcacggtggatccagtacaagggtcactgttacaagtctgatcaggcattgcacagtttttcagaggccaaaaaattgtgttcaaaacatgatcactctgcaactatcgtttccataaaagatgaagatgagaataaatttgtgagcagactgatgagggaaaataataacattaccatgagagtttggcttggattatctcaacattctgttgaccagtcttggagttggttagatggatcagaagtgacatttgtcaaatgggaaaataaaagtaagagtggtgttggaagatgtagcatgttgatagcttcaaatgaaacttggaaaaaagttgaatgtgaacatggttttggaagagttgtctgcaaagtgcctctgggccctgattacacagcaatagctatcatagttgccacactaagtatcttagttctcatgggcggactgatttggttcctcttccaaaggcaccgtttgcacctggcgggtttctcatcagttcgatatgcacaaggagtgaatgaagatgagattatgcttccttctttccatgactaaattcttctaaaagttttctaatttgcactaatgtgttatgagaaattagtcacttaaaatgtcccagtgtcagtatttactctgctccaaagtagaactcttaaatactttttcagttgtttagatcttaggcatgtgctggtatccacagttaattccctgctaaatgccatgtttatcaccctaattaatagaatggaggggactccaaagctggaactgaagtccaaattgtttgtacagtaatatgtttaatgttcattttctctgtatgaatgtgattggtaactaggatatgtatattttaatagaatttttaacaaaacttcttagaaaattaaaataggcatattactaggtgacatgtctactttttaatttttaagagcatccggccaaatgcaaaattagtacctcaaagtaaaaattgaactgtaaactctatcagcattgtttcaaaatagtcatttttagcactggggaaaaataaacaataagacatgcttactttttaatttttatttttttgagactgagtctctctctgttgcccaggctggagtacaatggcgtgatctcggctcactgcaaatctccgcctcccaggttcaagcgattctcctgcctcagcctcctgagtagctgggattacaggcaactgccaccatgcccggctaatttttgtatttttagtagagatggggtttcaccatgttggccaggctggtctcgaactcgtgaccgcaggtgatcctcccgcctcggcctcccaaagtgctgggattacaggcatgagccaccgcgcctggcctctgcttactttttatatagcaaaatgattcctcttggcaagatgtttcttatattattccaaagttatttcataccattattatgtaaatatgaagagtttttttctgtttataattgtttataaaacaatgacttttaaagatttagtgcttaacattttcccaagtgtgggaacattatttttagattgagtaggtaccttgtagcagtgtgctttgcattttctgatgtattacatgactgtttcttttgtaaagagaatcaactaggtatttaagactgataattttacaatttatatgcttcacatagcatgtcaacttttgactaagaattttgttttacttttttaacatgtgttaaacagagaaagggtccatgaaggaaagtgtatgagttgcatttgtaaaaatgagactttttcagtggaactctaaaccttgtgatgactactaacaaatgtaaaattatgagtgattaagaaaacattgctttgtggttatcactttaagttttgacacctagattatagtcttagtaatagcatccactggaaaaggtgaaaatgttttattcagcatttaacttacatttgtactttagagtatttttgtataaaatccatagatttattttacatttagagtatttacactatgataaagttgtaaataattttctaagacagtttttatatagtctacagttgtcctgatttcttattgaatttgttagactagttctcttgtcctgtgatctgtgtacaattttagtcactaagactttcctccaagaactaagccaacttgatgtgaaaagcacagctgtatataatggtgatgtcataataaagttgttttatcttttaagtaaaagt

SEQ ID NO: 11 - RNA, 6928 nt, Homo sapiens
  source 1..6928: mol_type = other RNA
ggcgggagcgcgtgcgcccgaggacccggccggaaggcttgcgccagctcaggatgaggacaggctgggcgacccctcgccgcccggcggggctcctcatgctgctcttctggttcttcgatctcgcggagccctctggccgcgcagctaatgaccccttcaccatcgtccatggaaatacgggcaagtgcatcaagccagtgtatggctggatagtagcagacgactgtgatgaaactgaggacaagttatggaagtgggtgtcccagcatcggctctttcatttgcactcccaaaagtgccttggcctcgatattaccaaatcggtaaatgagctgagaatgttcagctgtgactccagtgccatgctgtggtggaaatgtgagcaccactctctgtacggagctgcccggtaccggctggctctgaaggatggacatggcacagcaatctcaaatgcatctgatgtctggaagaaaggaggctcagaggaaagcctttgtgaccagccttatcatgagatctataccagagatgggaactcttatgggagaccttgtgaatttccattcttaattgatgggacctggcatcatgattgcattcttgatgaagatcatagtgggccatggtgtgccaccaccttaaattatgaatatgaccgaaagtggggcatctgcttaaagcctgaaaacggttgtgaagataattgggaaaagaacgagcagtttggaagttgctaccaatttaatactcagacggctctttcttggaaagaagcttatgtttcatgtcagaatcaaggagctgatttactgagcatcaacagtgctgctgaattaacttaccttaaagaaaaagaaggcattgctaagattttctggattggtttaaatcagctatactctgctagaggctgggaatggtcagaccacaaaccattaaactttctcaactgggatccagacaggcccagtgcacctactataggtggctccagctgtgcaagaatggatgctgagtctggtctgtggcagagcttttcctgtgaagctcaactgccctatgtctgcaggaaaccattaaataatacagtggagttaacagatgtctggacatactcagatacccgctgtgatgcaggctggctgccaaataatggattttgctatctgctggtaaatgaaagtaattcctgggataaggcacatgcgaaatgcaaagccttcagtagtgacctaatcagcattcattctctagcagatgtggaggtggttgtcacaaaactccataatgaggatatcaaagaagaagtgtggataggccttaagaacataaacataccaactttatttcagtggtcagatggtactgaagttactctaacatattgggatgagaatgagccaaatgttccctacaataagacgcccaactgtgtttcctacttaggagagctaggtcagtggaaagtccaatcatgtgaggagaaactaaaatatgtatgcaagagaaagggagaaaaactgaatgacgcaagttctgataagatgtgtcctccagatgagggctggaagagacatggagaaacctgttacaagatttatgaggatgaggtcccttttggaacaaactgcaatctgactatcactagcagatttgagcaagaatacctaaatgatttgatgaaaaagtatgataaatctctaagaaaatacttctggactggcctgagagatgtagattcttgtggagagtataactgggcaactgttggtggaagaaggcgggctgtaaccttttccaactggaattttcttgagccagcttccccgggcggctgcgtggctatgtctactggaaagtctgttggaaagtgggaggtgaaggactgcagaagcttcaaagcactttcaatttgcaagaaaatgagtggaccccttgggcctgaagaagcatcccctaagcctgatgacccctgtcctgaaggctggcagagtttccccgcaagtctttcttgttataaggtattccatgcagaaagaattgtaagaaagaggaactgggaagaagctgaacgattctgccaagcccttggagcacacctttctagcttcagccatgtggatgaaataaaggaatttcttcactttttaacggaccagttcagtggccagcattggctgtggattggtttgaataaaaggagcccagatttacaaggatcctggcaatggagtgatcgtacaccagtgtctactattatcatgccaaatgagtttcagcaggattatgacatcagagactgtgctgctgtcaaggtatttcataggccatggcgaagaggctggcatttctatgatgatagagaatttatttatttgaggccttttgcttgtgatacaaaacttgaatgggtgtgccaaattccaaaaggccgtactccaaaaacaccagactggtacaatccagaccgtgctggaattcatggacctccacttataattgaaggaagtgaatattggtttgttgctgatcttcacctaaactatgaagaagccgtcctgtactgtgccagcaatcacagctttcttgcgactataacatcttttgtgggactaaaagccatcaaaaacaaaatagcaaatatatctggtgatggacagaagtggtggataagaattagcgagtggccaatagatgatcattttacatactcacgatatccatggcaccgctttcctgtgacatttggagaggaatgcttgtacatgtctgccaagacttggcttatcgacttaggtaaaccaacagactgtagtaccaagttgcccttcatctgtgaaaaatataatgtttcttcgttagagaaatacagcccagattctgcagctaaagtgcaatgttctgagcaatggattccttttcagaataagtgttttctaaagatcaaacccgtgtctctcacattttctcaagcaagcgatacctgtcactcctatggtggcacccttccttcagtgttgagccagattgaacaagactttattacatccttgcttccggatatggaagctactttatggattggtttgcgctggactgcctatgaaaagataaacaaatggacagataacagagagctgacgtacagtaactttcacccattattggttagtgggaggctgagaataccagaaaatttttttgaggaagagtctcgctaccactgtgccctaatactcaacctccaaaaatcaccgtttactgggacgtggaattttacatcctgcagtgaacgccactttgtgtctctctgtcagaaatattcagaagttaaaagcagacagacgttgcagaatgcttcagaaactgtaaagtatctaaataatctgtacaaaataatcccaaagactctgacttggcacagtgctaaaagggagtgtctgaaaagtaacatgcagctggtgagcatcacggacccttaccagcaggcattcctcagtgtgcaggcgctccttcacaactcttccttatggatcggactcttcagtcaagatgatgaactcaactttggttggtcagatgggaaacgtcttcattttagtcgctgggctgaaactaatgggcaactcgaagactgtgtagtattagacactgatggattctggaaaacagttgattgcaatgacaatcaaccaggtgctatttgctactattcaggaaatgagactgaaaaagaggtcaaaccagttgacagtgttaaatgtccatctcctgttctaaatactccgtggataccatttcagaactgttgctacaatttcataataacaaagaataggcatatggcaacaacacaggatgaagttcatactaaatgccagaaactgaatccaaaatcacatattctgagtattcgagatgaaaaggagaataactttgttcttgagcaactgctgtacttcaattatatggcttcatgggtcatgttaggaataacttatagaaataattctcttatgtggtttgataagaccccactgtcatatacacattggagagcaggaagaccaactataaaaaatgagaagtttttggctggtttaagtactgacggcttctgggatattcaaacctttaaagttattgaagaagcagtttattttcaccagcacagcattcttgcttgtaaaattgaaatggttgactacaaagaagaacataatactacactgccacagtttatgccatatgaagatggtatttacagtgttattcaaaaaaaggtaacatggtatgaagcattaaacatgtgttctcaaagtggaggtcacttggcaagcgttcacaaccaaaatggccagctctttctggaagatattgtaaaacgtgatggatttccactatgggttgggctctcaagtcatgatggaagtgaatcaagttttgaatggtctgatggtagtacatttgactatatcccatggaaaggccaaacatctcctggaaattgtgttctcttggatccaaaaggaacttggaaacatgaaaaatgcaactctgttaaggatggtgctatttgttataaacctacaaaatctaaaaagctgtcccgtcttacatattcatcaagatgtccagcagcaaaagagaatgggtcacggtggatccagtacaagggtcactgttacaagtctgatcaggcattgcacagtttttcagaggccaaaaaattgtgttcaaaacatgatcactctgcaactatcgtttccataaaagatgaagatgagaataaatttgtgagcagactgatgagggaaaataataacattaccatgagagtttggcttggattatctcaacattctgttgaccagtcttggagttggttagatggatcagaagtgacatttgtcaaatgggaaaataaaagtaagagtggtgttggaagatgtagcatgttgatagcttcaaatgaaacttggaaaaaagttgaatgtgaacatggttttggaagagttgtctgcaaagtgcctctgggccctgattacacagcaatagctatcatagttgccacactaagtatcttagttctcatgggcggactgatttggttcctcttccaaaggcaccgtttgcacctggcgggtttctcatcagttcgatatgcacaaggagtgaatgaagatgagattatgcttccttctttccatgactaaattcttctaaaagttttctaatttgcactaatgtggttatggagaaattagtcacttaaaatgtcccagtgtcagtatttactctgctccaaagtagaactcttaaatactttttcagttgtttagatcttaggcatgtgctggtatccacagttaattccctgctaaatgccatgtttatcaccctaattaatagaatggaggggactccaaagctggaactgaagtccaaattgtttgtacagtaatatgtttaatgttcattttctctgtatgaatgtgattggtaactaggatatgtatattttaatagaatttttaacaaaacttcttagaaaattaaaataggcatattactaggtgacatgtctactttttaatttttaagagcatccggccaaatgcaaaattagtacctcaaagtaaaaattgaactgtaaactctatcagcattgtttcaaaatagtcatttttagcactggggaaaaataaacaataagacatgcttactttttaatttttatttttttgagactgagtctctctctgttgcccaggctggagtacaatggcgtgatctcggctcactgcaaatctccgcctcccaggttcaagcgattctcctgcctcagcctcctgagtagctgggattacaggcaactgccaccatgcccggctaatttttgtatttttagtagagatggggtttcaccatgttggccaggctggtctcgaactcgtgaccgcagtgatcctcccgcctcggcctcccaaagtgctgggattacaggcatgagccaccgcgcctggcctctgcttactttttatatagcaaaatgattccccttggcaagatgtttcttatattattccaaagttatttcataccattattatgtaaatatgaagagtttttttctgtttataattgtttataaaacaatgacttttaaagatttagtgcttaacattttcccaagtgtgggaacattatttttagattgagtaggtaccttgtagcagtgtgctttgcattttctgatgtattacatgactgtttcttttgtaaagagaatcaactaggtatttaagactgataattttacaatttatatgcttcacatagcatgtcaacttttgactaagaattttgttttacttttttaacatgtgttaaacagagaaagggtccatgaaggaaagtgtatgagttgcatttgtaaaaatgagactttttcagtggaactctaaaccttgtgatgactactaacaaatgtaaaattatgagtgattaagaaaacattgctttgtggttatcactttaagttttgacacctagattatagtcttagtaatagcatccactggaaaaggtgaaaatgttttattcagcatttaacttacatttgtactttagagtatttttgtataaaatccatagatttattttacatttagagtatttacactatgataaagttgtaaataattttctaagacagtttttatatagtctacagttgtcctgatttcttattgaatttgttagactagttctcttgtcttgtgatctgtgtacaattttagtcactaagactttcctccaagaactaagccaacttgatgtgaaaagcacggctgtatataatggtgatgtcataataaagttgttttatcttttaagtaaaaaaaaaaaaaaaaaaaaa

SEQ ID NO: 12 - RNA, 5169 nt, Homo sapiens
  source 1..5169: mol_type = other RNA
atgaggacaggctgggcgacccctcgccgcccggcggggctcctcatgctgctcttctggttcttcgatctcgcggagccctctggccgcgcagctaatgaccccttcaccatcgtccatggaaatacgggcaagtgcatcaagccagtgtatggctggatagtagcagacgactgtgatgaaactgaggacaagttatggaagtgggtgtcccagcatcggctctttcatttgcactcccaaaagtgccttggcctcgatattaccaaatcggtaaatgagctgagaatgttcagctgtgactccagtgccatgctgtggtggaaatgtgagcaccactctctgtacggagctgcccggtaccggctggctctgaaggatggacatggcacagcaatctcaaatgcatctgatgtctggaagaaaggaggctcagaggaaagcctttgtgaccagccttatcatgagatctataccagagatgggaactcttatgggagaccttgtgaatttccattcttaattgatgggacctggcatcatgattgcattcttgatgaagatcatagtgggccatggtgtgccaccaccttaaattatgaatatgaccgaaagtggggcatctgcttaaagcctgaaaacggttgtgaagataattgggaaaagaacgagcagtttggaagttgctaccaatttaatactcagacggctctttcttggaaagaagcttatgtttcatgtcagaatcaaggagctgatttactgagcatcaacagtgctgctgaattaacttaccttaaagataaagaaggcattgctaagattttctggattggtttaaatcagctatactctgctagaggctgggaatggtcagaccacaaaccattaaactttctcaactgggatccagacaggcccagtgcacctactataggtggctccagctgtgcaagaatggatgctgagtctggtctgtggcagagcttttcctgtgaagctcaactgccctatgtctgcaggaaaccattaaataatacagtggagttaacagatgtctggacatactcagatacccgctgtgatgcaggctggctgccaaataatggattttgctatctgctggtaaatgaaagtaattcctgggataaggcacatgcgaaatgcaaagccttcagtagtgacctaatcagcattcattctctagcagatgtggaggtggttgtcacaaaactccataatgaggatatcaaagaagaagtgtggataggccttaagaacataaacataccaactttatttcagtggtcagatggtactgaagttactctaacatattgggatgagaatgagccaaatgttccctacaataagacgcccaactgtgtttcctacttaggagagctaggtcagtggaaagtccaatcatgtgaggagaaactaaaatatgtatgcaagagaaagggagaaaaactgaatgacgcaagttctgataagatgtgtcctccagatgagggctggaagagacatggagaaacctgttacaagatttatgaggatgaggtcccttttggaacaaactgcaatctgactatcactagcagatttgagcaagaatacctaaatgatttgatgaaaaagtatgataaatctctaagaaaatacttctggactggcctgagagatgtagattcttgtggagagtataactgggcaactgttggtggaagaaggcgggctgtaaccttttccaactggaattttcttgagccagcttccccgggcggctgcgttgctatgtcaactggaaagtctgttggaaagtgggaggtgaaggactgcagaagcttcaaagcactttcaatttgcaagaaaatgagtggaccccttgggcctgaagaagcatcccctaagcctgatgacccctgtcctgaaggctggcagagtttccccgcaagtctttcttgttataaggtatttcatgcagaaagaattgtaagaaagaggaactgggaagaagctgaacgattctgccaagcccttggagcacacctttctagcttcagccatgtggatgaaataaaggaatttcttcactttttaacggaccagttcagtggccagcattggctgtggattggtttgaataaaaggagcccagatttacaaggatcttggcaatggagtgatcgtacaccagtgtctactattatcatgccaaatgagtttcagcaggattatgacatcagagactgtgctgctgtcaaggtatttcataggccatggcgaagaggctggcatttctatgatgatagagaatttatttatttgaggccttttgcttgtgatacaaaacttgaatgggtgtgccaaattccaaaaggccgtactccaaaaacaccagactggtacaatccagagcgtgctggaattcatggacctccacttataattgaaggaagtgaatattggtttgttgctgatcttcacctaaactatgaagaagccgtcctgtactgtgccagcaatcacagctttcttgcaactataacatcttttgtgggactaaaagccatcaaaaacaaaatagcaaatatatctggtgatggacagaagtggtggataagaattagcgagtggccaatagatgatcattttacatactcacgatatccatggcaccgctttcctgtgacatttggagaggaatgcttgtacatgtctgccaagacttggcttatcgacttaggtaaaccaacagactgtagtaccaagttgcccttcatctgtgaaaaatataatgtttcttcgttagagaaatacagcccagattctgcagctaaagtgcaatgttctgagcaatggattccttttcagaataagtgttttctaaagatcaaacccgtgtctctcacattttctcaagcaagcgatacctgtcactcctatggtggcacccttccttcagtgttgagccagattgaacaagactttattacatccttgcttccggatatggaagctactttatggattggtttgcgctggactgcctatgaaaagataaacaaatggacagataacagagagctgacgtacagtaactttcacccattattggttagtgggaggctgagaataccagaaaatttttttgaggaagagtctcgctaccactgtgccctaatactcaacctccaaaaatcaccgtttactgggacgtggaattttacatcctgcagtgaacgccactttgtgtctctctgtcagaaatattcagaagttaaaagcagacagacgttgcagaatgcttcagaaactgtaaagtatctaaataatctgtacaaaataatcccaaagactctgacttggcacagtgctaaaagggagtgtctgaaaagtaacatgcagctggtgagcatcacggacccttaccagcaggcattcctcagtgtgcaggcgctccttcacaactcttccttatggatcggactcttcagtcaagatgatgaactcaactttggttggtcagatgggaaacgtcttcattttagtcgctgggctgaaactaatgggcaactcgaagactgtgtagtattagacactgatggattctggaaaacagttgattgcaatgacaatcaaccaggtgctatttgctactattcaggaaatgagactgaaaaagaggtcaaaccagttgacagtgttaaatgtccatctcctgttctaaatactccgtggataccatttcagaactgttgctacaatttcataataacaaagaataggcatatggcaacaacacaggatgaagttcatactaaatgccagaaactgaatccaaaatcacatattctgagtattcgagatgaaaaggagaataactttgttcttgagcaactgctgtacttcaattatatggcttcatgggtcatgttaggaataacttatagaaataagtctcttatgtggtttgataagaccccactgtcatatacacattggagagcaggaagaccaactataaaaaatgagaagtttttggctggtttaagtactgacggcttctgggatattcaaacctttaaagttattgaagaagcagtttattttcaccagcacagcattcttgcttgtaaaattgaaatggttgactacaaagaagaatataatactacactgccacagtttatgccatatgaagatggtatttacagtgttattcaaaaaaaggtaacatggtatgaagcattaaacatgtgttctcaaagtggaggtcacttggcaagcgttcacaaccaaaatggccagctctttctggaagatattgtaaaacgtgatggatttccactatgggttgggctctcaagtcatgatggaagtgaatcaagttttgaatggtctgatggtagtacatttgactatatcccatggaaaggccaaacatctcctggaaattgtgttctcttggatccaaaaggaacttggaaacatgaaaaatgcaactctgttaaggatggtgctatttgttataaacctacaaaatctaaaaagctgtcccgtcttacatattcatcaagatgtccagcagcaaaagagaatgggtcacggtggatccagtacaagggtcactgttacaagtctgatcaggcattgcacagtttttcagaggccaaaaaattgtgttcaaaacatgatcactctgcaactatcgtttccataaaagatgaagatgagaataaatttgtgagcagactgatgagggaaaataataacattaccatgagagtttggcttggattatctcaacattctgttgaccagtcttggagttggttagatggatcagaagtgacatttgtcaaatgggaaaataaaagtaagagtggtgttggaagatgtagcatgttgatagcttcaaatgaaacttggaaaaaagttgaatgtgaacatggttttggaagagttgtctgcaaagtgcctctgggccctgattacacagcaatagctatcatagttgccacactaagtatcttagttctcatgggcggactgatttggttcctcttccaaaggcaccgtttgcacctggcgggtttctcatcagttcgatatgcacaaggagtgaatgaagatgagattatgcttccttctttccatgactaa

SEQ ID NO: 13 - RNA, 6886 nt, Homo sapiens
  source 1..6886: mol_type = other RNA
ccggccggaaggcttgcgccagctcaggatgaggacaggctgggcgacccctcgccgcccggcggggctcctcatgctgctcttctggttcttcgatctcgcggagccctctggccgcgcagctaatgaccccttcaccatcgtccatggaaatacgggcaagtgcatcaagccagtgtatggctggatagtagcagacgactgtgatgaaactgaggacaagttatggaagtgggtgtcccagcatcggctctttcatttgcactcccaaaagtgccttggcctcgatattaccaaatcggtaaatgagctgagaatgttcagctgtgactccagtgccatgctgtggtggaaatgtgagcaccactctctgtacggagctgcccggtaccggctggctctgaaggatggacatggcacagcaatctcaaatgcatctgatgtctggaagaaaggaggctcagaggaaagcctttgtgaccagccttatcatgagatctataccagagatgggaactcttatgggagaccttgtgaatttccattcttaattgatgggacctggcatcatgattgcattcttgatgaagatcatagtgggccatggtgtgccaccaccttaaattatgaatatgaccgaaagtggggcatctgcttaaagcctgaaaacggttgtgaagataattgggaaaagaacgagcagtttggaagttgctaccaatttaatactcagacggctctttcttggaaagaagcttatgtttcatgtcagaatcaaggagctgatttactgagcatcaacagtgctgctgaattaacttaccttaaagaaaaagaaggcattgctaagattttctggattggtttaaatcagctatactctgctagaggctgggaatggtcagaccacaaaccattaaactttctcaactgggatccagacaggcccagtgcacctactataggtggctccagctgtgcaagaatggatgctgagtctggtctgtggcagagcttttcctgtgaagctcaactgccctatgtctgcaggaaaccattaaataatacagtggagttaacagatgtctggacatactcagatacccgctgtgatgcaggctggctgccaaataatggattttgctatctgctggtaaatgaaagtaattcctgggataaggcacatgcgaaatgcaaagccttcagtagtgacctaatcagcattcattctctagcagatgtggaggtggttgtcacaaaactccataatgaggatatcaaagaagaagtgtggataggccttaagaacataaacataccaactttatttcagtggtcagatggtactgaagttactctaacatattgggatgagaatgagccaaatgttccctacaataagacgcccaactgtgtttcctacttaggagagctaggtcagtggaaagtccaatcatgtgaggagaaactaaaatatgtatgcaagagaaagggagaaaaactgaatgacgcaagttctgataagatgtgtcctccagatgagggctggaagagacatggagaaacctgttacaagatttatgaggatgaggtcccttttggaacaaactgcaatctgactatcactagcagatttgagcaagaatacctaaatgatttgatgaaaaagtatgataaatctctaagaaaatacttctggactggcctgagagatgtagattcttgtggagagtataactgggcaactgttggtggaagaaggcgggctgtaaccttttccaactggaattttcttgagccagcttccccgggcggctgcgtggctatgtctactggaaagtctgttggaaagtgggaggtgaaggactgcagaagcttcaaagcactttcaatttgcaagaaaatgagtggaccccttgggcctgaagaagcatcccctaagcctgatgacccctgtcctgaaggctggcagagtttccccgcaagtctttcttgttataaggtattccatgcagaaagaattgtaagaaagaggaactgggaagaagctgaacgattctgccaagcccttggagcacacctttctagcttcagccatgtggatgaaataaaggaatttcttcactttttaacggaccagttcagtggccagcattggctgtggattggtttgaataaaaggagcccagatttacaaggatcctggcaatggagtgatcgtacaccagtgtctactattatcatgccaaatgagtttcagcaggattatgacatcagagactgtgctgctgtcaaggtatttcataggccatggcgaagaggctggcatttctatgatgatagagaatttatttatttgaggccttttgcttgtgatacaaaacttgaatgggtgtgccaaattccaaaaggccgtactccaaaaacaccagactggtacaatccagaccgtgctggaattcatggacctccacttataattgaaggaagtgaatattggtttgttgctgatcttcacctaaactatgaagaagccgtcctgtactgtgccagcaatcacagctttcttgcaactataacatcttttgtgggactaaaagccatcaaaaacaaaatagcaaatatatctggtgatggacagaagtggtggataagaattagcgagtggccaatagatgatcattttacatactcacgatatccatggcaccgctttcctgtgacatttggagaggaatgcttgtacatgtctgccaagacttggcttatcgacttaggtaaaccaacagactgtagtaccaagttgcccttcatctgtgaaaaatataatgtttcttcgttagagaaatacagcccagattctgcagctaaagtgcaatgttctgagcaatggattccttttcagaataagtgttttctaaagatcaaacccgtgtctctcacattttctcaagcaagcgatacctgtcactcctatggtggcacccttccttcagtgttgagccagattgaacaagactttattacatccttgcttccggatatggaagctactttatggattggtttgcgctggactgcctatgaaaagataaacaaatggacagataacagagagctgacgtacagtaactttcacccattattggttagtgggaggctgagaataccagaaaatttttttgaggaagagtctcgctaccactgtgccctaatactcaacctccaaaaatcaccgtttactgggacgtggaattttacatcctgcagtgaacgccactttgtgtctctctgtcagaaatattcagaagttaaaagcagacagacgttgcagaatgcttcagaaactgtaaagtatctaaataatctgtacaaaataatcccaaagactctgacttggcacagtgctaaaagggagtgtctgaaaagtaacatgcagctggtgagcatcacggacccttaccagcaggcattcctcagtgtgcaggcgctccttcacaactcttccttatggatcggactcttcagtcaagatgatgaactcaactttggttggtcagatgggaaacgtcttcattttagtcgctgggctgaaactaatgggcaactcgaagactgtgtagtattagacactgatggattctggaaaacagttgattgcaatgacaatcaaccaggtgctatttgctactattcaggaaatgagactgaaaaagaggtcaaaccagttgacagtgttaaatgtccatctcctgttctaaatactccgtggataccatttcagaactgttgctacaatttcataataacaaagaataggcatatggcaacaacacaggatgaagttcatactaaatgccagaaactgaatccaaaatcacatattctgagtattcgagatgaaaaggagaataactttgttcttgagcaactgctgtacttcaattatatggcttcatgggtcatgttaggaataacttatagaaataagtctcttatgtggtttgataagaccccactgtcatatacacattggagagcaggaagaccaactataaaaaatgagaagtttttggctggtttaagtactgacggcttctgggatattcaaacctttaaagttattgaagaagcagtttattttcaccagcacagcattcttgcttgtaaaattgaaatggttgactacaaagaagaatataatactacactgccacagtttatgccatatgaagatggtatttacagtgttattcaaaaaaaggtaacatggtatgaagcattaaacatgtgttctcaaagtggaggtcacttggcaagcgttcacaaccaaaatggccagctctttctggaagatattgtaaaacgtgatggatttccactatgggttgggctctcaagtcatgatggaagtgaatcaagttttgaatggtctgatggtagtacatttgactatatcccatggaaaggccaaacatctcctggaaattgtgttctcttggatccaaaaggaacttggaaacatgaaaaatgcaactctgttaaggatggtgctatttgttataaacctacaaaatctaaaaagctgtcccgtcttacatattcatcaagatgtccagcagcaaaagagaatgggtcacggtggatccagtacaagggtcactgttacaagtctgatcaggcattgcacagtttttcagaggccaaaaaattgtgttcaaaacatgatcactctgcaactatcgtttccataaaagatgaagatgagaataaatttgtgagcagactgatgagggaaaataataacattaccatgagagtttggcttggattatctcaacattctgttgaccagtcttggagttggttagatggatcagaagtgacatttgtcaaatgggaaaataaaagtaagagtggtgttggaagatgtagcatgttgatagcttcaaatgaaacttggaaaaaagttgaatgtgaacatggttttggaagagttgtctgcaaagtgcctctgggccctgattacacagcaatagctatcatagttgccacactaagtatcttagttctcatgggcggactgatttggttcctcttccaaaggcaccgtttgcacctggcgggtttctcatcagttcgatatgcacaaggagtgaatgaagatgagattatgcttccttctttccatgactaaattcttctaaaagttttctaatttgcactaatgtgttatgagaaattagtcacttaaaatgtcccagtgtcagtatttactctgctccaaagtagaactcttaaatactttttcagttgtttagatcttaggcatgtgctggtatccacagttaattccctgctaaatgccatgtttatcaccctaattaatagaatggaggggactccaaagctggaactgaagtccaaattgtttgtacagtaatatgtttaatgttcattttctctgtatgaatgtgattggtaactaggatatgtatattttaatagaatttttaacaaaacttcttagaaaattaaaataggcatattactaggtgacatgtctactttttaatttttaagagcatccggccaaatgcaaaattagtacctcaaagtaaaaattgaactgtaaactctatcagcattgtttcaaaatagtcatttttagcactggggaaaaataaacaataagacatgcttactttttaatttttatttttttgagactgagtctctctctgttgcccaggctggagtacaatggcgtgatctcggctcactgcaaatctccgcctcccaggttcaagcgattctcctgcctcagcctcctgagtagctgggattacaggcaactgccaccatgcccggctaatttttgtatttttagtagagatggggtttcaccatgttggccaggctggtctcgaactcgtgaccgcaggtgatcctcccgcctcggcctcccaaagtgctgggattacaggcatgagccaccgcgcctggcctctgcttactttttatatagcaaaatgattcctcttggcaagatgtttcttatattattccaaagttatttcataccattattatgtaaatatgaagagtttttttctgtttataattgtttataaaacaatgacttttaaagatttagtgcttaacattttcccaagtgtgggaacattatttttagattgagtaggtaccttgtagcagtgtgctttgcattttctgatgtattacatgactgtttcttttgtaaagagaatcaactaggtatttaagactgataattttacaatttatatgcttcacatagcatgtcaacttttgactaagaattttgttttacttttttaacatgtgttaaacagagaaagggtccatgaaggaaagtgtatgagttgcatttgtaaaaatgagactttttcagtggaactctaaaccttgtgatgactactaacaaatgtaaaattatgagtgattaagaaaacattgctttgtggttatcactttaagttttgacacctagattatagtcttagtaatagcatccactggaaaaggtgaaaatgttttattcggcatttaacttacatttgtactttatttttgtataaaatccatagatttattttacatttagagtatttacactatgataaagttgtaaataattttctaagacagtttttatatagtctacagttgtcctgatttcttattgaatttgttagactagttctcttgtcctgtgatctgtgtacaattttagtcactaagactttcctccaagaactaagccaacttgatgtgaaaagcacagctgtatataatggtgatgtcataataaagttgttttatcttttaagtaaaagtaaaa

SEQ ID NO: 14 - RNA, 6932 nt, Homo sapiens
  source 1..6932: mol_type = other RNA
aggccgcgctcagcaggcggggcgggagccgcgtgcgcccgaggacccggccggaaggcttgcgccagctcaggatgaggacaggctgggcgacccctcgccgcccggcggggctcctcatgctgctcttctggttcttcgatctcgcggagccctctggccgcgcagctaatgaccccttcaccatcgtccatggaaatacgggcaagtgcatcaagccagtgtatggctggatagtagcagacgactgtgatgaaactgaggacaagttatggaagtgggtgtcccagcatcggctctttcatttgcactcccaaaagtgccttggcctcgatattaccaaatcggtaaatgagctgagaatgttcagctgtgactccagtgccatgctgtggtggaaatgtgagcaccactctctgtacggagctgcccggtaccggctggctctgaaggatggacatggcacagcaatctcaaatgcatctgatgtctggaagaaaggaggctcagaggaaagcctttgtgaccagccttatcatgagatctataccagagatgggaactcttatgggagaccttgtgaatttccattcttaattgatgggacctggcatcatgattgcattcttgatgaagatcatagtgggccatggtgtgccaccaccttaaattatgaatatgaccgaaagtggggcatctgcttaaagcctgaaaacggttgtgaagataattgggaaaagaacgagcagtttggaagttgctaccaatttaatactcagacggctctttcttggaaagaagcttatgtttcatgtcagaatcaaggagctgatttactgagcatcaacagtgctgctgaattaacttaccttaaagaaaaagaaggcattgctaagattttctggattggtttaaatcagctatactctgctagaggctgggaatggtcagaccacaaaccattaaactttctcaactgggatccagacaggcccagtgcacctactataggtggctccagctgtgcaagaatggatgctgagtctggtctgtggcagagcttttcctgtgaagctcaactgccctatgtctgcaggaaaccattaaataatacagtggagttaacagatgtctggacatactcagatacccgctgtgatgcaggctggctgccaaataatggattttgctatctgctggtaaatgaaagtaattcctgggataaggcacatgcgaaatgcaaagccttcagtagtgacctaatcagcattcattctctagcagatgtggaggtggttgtcacaaaactccataatgaggatatcaaagaagaagtgtggataggccttaagaacataaacataccaactttatttcagtggtcagatggtactgaagttactctaacatattgggatgagaatgagccaaatgttccctacaataagacgcccaactgtgtttcctacttaggagagctaggtcagtggaaagtccaatcatgtgaggagaaactaaaatatgtatgcaagagaaagggagaaaaactgaatgacgcaagttctgataagatgtgtcctccagatgagggctggaagagacatggagaaacctgttacaagatttatgaggatgaggtcccttttggaacaaactgcaatctgactatcactagcagatttgagcaagaatacctaaatgatttgatgaaaaagtatgataaatctctaagaaaatacttctggactggcctgagagatgtagattcttgtggagagtataactgggcaactgttggtggaagaaggcgggctgtaaccttttccaactggaattttcttgagccagcttccccgggcggctgcgtggctatgtctactggaaagtctgttggaaagtgggaggtgaaggactgcagaagcttcaaagcactttcaatttgcaagaaaatgagtggaccccttgggcctgaagaagcatcccctaagcctgatgacccctgtcctgaaggctggcagagtttccccgcaagtctttcttgttataaggtattccatgcagaaagaattgtaagaaagaggaactgggaagaagctgaacgattctgccaagcccttggagcacacctttctagcttcagccatgtggatgaaataaaggaatttcttcactttttaacggaccagttcagtggccagcattggctgtggattggtttgaataaaaggagcccagatttacaaggatcctggcaatggagtgatcgtacaccagtgtctactattatcatgccaaatgagtttcagcaggattatgacatcagagactgtgctgctgtcaaggtatttcataggccatggcgaagaggctggcatttctatgatgatagagaatttatttatttgaggccttttgcttgtgatacaaaacttgaatgggtgtgccaaattccaaaaggccgtactccaaaaacaccagactggtacaatccagaccgtgctggaattcatggacctccacttataattgaaggaagtgaatattggtttgttgctgatcttcacctaaactatgaagaagccgtcctgtactgtgccagcaatcacagctttcttgcaactataacatcttttgtgggactaaaagccatcaaaaacaaaatagcaaatatatctggtgatggacagaagtggtggataagaattagcgagtggccaatagatgatcattttacatactcacgatatccatggcaccgctttcctgtgacatttggagaggaatgcttgtacatgtctgccaagacttggcttatcgacttaggtaaaccaacagactgtagtaccaagttgcccttcatctgtgaaaaatataatgtttcttcgttagagaaatacagcccagattctgcagctaaagtgcaatgttctgagcaatggattccttttcagaataagtgttttctaaagatcaaacccgtgtctctcacattttctcaagcaagcgatacctgtcactcctatggtggcacccttccttcagtgttgagccagattgaacaagactttattacatccttgcttccggatatggaagctactttatggattggtttgcgctggactgcctatgaaaagataaacaaatggacagataacagagagctgacgtacagtaactttcacccattattggttagtgggaggctgagaataccagaaaatttttttgaggaagagtctcgctaccactgtgccctaatactcaacctccaaaaatcaccgtttactgggacgtggaattttacatcctgcagtgaacgccactttgtgtctctctgtcagaaatattcagaagttaaaagcagacagacgttgcagaatgcttcagaaactgtaaagtatctaaataatctgtacaaaataatcccaaagactctgacttggcacagtgctaaaagggagtgtctgaaaagtaacatgcagctggtgagcatcacggacccttaccagcaggcattcctcagtgtgcaggcgctccttcacaactcttccttatggatcggactcttcagtcaagatgatgaactcaactttggttggtcagatgggaaacgtcttcattttagtcgctgggctgaaactaatgggcaactcgaagactgtgtagtattagacactgatggattctggaaaacagttgattgcaatgacaatcaaccaggtgctatttgctactattcaggaaatgagactgaaaaagaggtcaaaccagttgacagtgttaaatgtccatctcctgttctaaatactctgtggataccatttcagaactgttgctacaatttcataataacaaagaataggcatatggcaacaacacaggatgaagttcatactaaatgccagaaactgaatccaaaatcacatattctgagtattcgagatgaaaaggagaataactttgttcttgagcaactgctgtacttcaattatatggcttcatgggtcatgttaggaataacttatagaaataagtctcttatgtggtttgataagaccccactgtcatatacacattggagagcaggaagaccaactataaaaaatgagaagtttttggctggtttaagtactgacggcttctgggatattcaaacctttaaagttattgaagaagcagtttattttcaccagcacagcattcttgcttgtaaaattgaaatggttgactacaaagaagaatataatactacactgccacagtttatgccatatgaagatggtatttacagtgttattcaaaaaaaggtaacatggtatgaagcattaaacatgtgttctcaaagtggaggtcacttggcaagcgttcacaaccaaaatggccagctctttctggaagatattgtaaaacgtgatggatttccactatgggttgggctctcaagtcatgatggaagtgaatcaagttttgaatggtctgatggtagtacatttgactatatcccatggaaaggccaaacatctcctggaaattgtgttctcttggatccaaaaggaacttggaaacatgaaaaatgcaactctgttaaggatggtgctatttgttataaacctacaaaatctaaaaagctgtcccgtcttacatattcatcaagatgtccagcagcaaaagagaatgggtcacggtggatccagtacaagggtcactgttacaagtctgatcaggcattgcacagtttttcagaggccaaaaaattgtgttcaaaacatgatcactctgcaactatcgtttccataaaagatgaagatgagaataaatttgtgagcagactgatgagggaaaataataacattaccatgagagtttggcttggattatctcaacattctgttgaccagtcttggagttggttagatggatcagaagtgacatttgtcaaatgggaaaataaaagtaagagtggtgttggaagatgtagcatgttgatagcttcaaatgaaacttggaaaaaagttgaatgtgaacatggttttggaagagttgtctgcaaagtgcctctgggccctgattacacagcaatagctatcatagttgccacactaagtatcttagttctcatgggcggactgatttggttcctcttccaaaggcaccgtttgcacctggcgggtttctcatcagttcgatatgcacaaggagtgaatgaagatgagattatgcttccttctttccatgactaaattcttctaaaagttttctaatttgcactaatgtgttatgagaaattagtcacttaaaatgtcccagtgtcagtatttactctgctccaaagtagaactcttaaatactttttcagttgtttagatcttaggcatgtgctggtatccacagttaattccctgctaaatgccatgtttatcaccctaattaatagaatggaggggactccaaagctggaactgaagtccaaattgtttgtacagtaatatgtttaatgttcattttctctgtatgaatgtgattggtaactaggatatgtatattttaatagaatttttaacaaaacttcttagaaaattaaaataggcatattactaggtgacatgtctactttttaatttttaagagcatccggccaaatgcaaaattagtacctcaaagtaaaaattgaactgtaaactctatcagcattgtttcaaaatagtcatttttagcactggggaaaaataaacaataagacatgcttactttttaatttttatttttttgagactgagtctctctctgttgcccaggctggagtacaatggcgtgatctcggctcactgcaaatctccgcctcccaggttcaagcgattctcctgcctcagcctcctgagtagctgggattacaggcaactgccaccatgcccggctaatttttgtatttttagtagagatggggtttcaccatgttggccaggctggtctcgaactcgtgaccgcaggtgatcctcccgcctcggcctcccaaagtgctgggattacaggcatgagccaccgcgcctggcctctgcttactttttatatagcaaaatgattcctcttggcaagatgtttcttatattattccaaagttatttcataccattattatgtaaatatgaagagtttttttctgtttataattgtttataaaacaatgacttttaaagatttagtgcttaacattttcccaagtgtgggaacattatttttagattgagtaggtaccttgtagcagtgtgctttgcattttctgatgtattacatgactgtttcttttgtaaagagaatcaactaggtatttaagactgataattttacaatttatatgcttcacatagcatgtcaacttttgactaagaattttgttttacttttttaacatgtgttaaacagagaaagggtccatgaaggaaagtgtatgagttgcatttgtaaaaatgagactttttcagtggaactctaaaccttgtgatgactactaacaaatgtaaaattatgagtgattaagaaaacattgctttgtggttatcactttaagttttgacacctagattatagtcttagtaatagcatccactggaaaaggtgaaaatgttttattcggcatttaacttacatttgtactttatttttgtataaaatccatagatttattttacatttagagtatttacactatgataaagttgtaaataattttctaagacagtttttatatagtctacagttgtcctgatttcttattgaatttgttagactagttctcttgtcctgtgatctgtgtacaattttagtcactaagactttcctccaagaactaagccaacttgatgtgaaaagcacagctgtatataatggtgatgtcataataaagttgttttatcttttaagtaaaagtaaaa

SEQ ID NO: 15 - RNA, 5650 nt, Homo sapiens
  source 1..5650: mol_type = other RNA
ccggccggaaggcttgcgccagctcaggatgaggacaggctgggcgacccctcgccgcccggcggggctcctcatgctgctcttctggttcttcgatctcgcggagccctctggccgcgcagctaatgaccccttcaccatcgtccatggaaatacgggcaagtgcatcaagccagtgtatggctggatagtagcagacgactgtgatgaaactgaggacaagttatggaagtgggtgtcccagcatcggctctttcatttgcactcccaaaagtgccttggcctcgatattaccaaatcggtaaatgagctgagaatgttcagctgtgactccagtgccatgctgtggtggaaatgtgagcaccactctctgtacggagctgcccggtaccggctggctctgaaggatggacatggcacagcaatctcaaatgcatctgatgtctggaagaaaggaggctcagaggaaagcctttgtgaccagccttatcatgagatctataccagagatgggaactcttatgggagaccttgtgaatttccattcttaattgatgggacctggcatcatgattgcattcttgatgaagatcatagtgggccatggtgtgccaccaccttaaattatgaatatgaccgaaagtggggcatctgcttaaagcctgaaaacggttgtgaagataattgggaaaagaacgagcagtttggaagttgctaccaatttaatactcagacggctctttcttggaaagaagcttatgtttcatgtcagaatcaaggagctgatttactgagcatcaacagtgctgctgaattaacttaccttaaagaaaaagaaggcattgctaagattttctggattggtttaaatcagctatactctgctagaggctgggaatggtcagaccacaaaccattaaactttctcaactgggatccagacaggcccagtgcacctactataggtggctccagctgtgcaagaatggatgctgagtctggtctgtggcagagcttttcctgtgaagctcaactgccctatgtctgcaggaaaccattaaataatacagtggagttaacagatgtctggacatactcagatacccgctgtgatgcaggctggctgccaaataatggattttgctatctgctggtaaatgaaagtaattcctgggataaggcacatgcgaaatgcaaagccttcagtagtgacctaatcagcattcattctctagcagatgtggaggtggttgtcacaaaactccataatgaggatatcaaagaagaagtgtggataggccttaagaacataaacataccaactttatttcagtggtcagatggtactgaagttactctaacatattgggatgagaatgagccaaatgttccctacaataagacgcccaactgtgtttcctacttaggagagctaggtcagtggaaagtccaatcatgtgaggagaaactaaaatatgtatgcaagagaaagggagaaaaactgaatgacgcaagttctgataagatgtgtcctccagatgagggctggaagagacatggagaaacctgttacaagatttatgaggatgaggtcccttttggaacaaactgcaatctgactatcactagcagatttgagcaagaatacctaaatgatttgatgaaaaagtatgataaatctctaagaaaatacttctggactggcctgagagatgtagattcttgtggagagtataactgggcaactgttggtggaagaaggcgggctgtaaccttttccaactggaattttcttgagccagcttccccgggcggctgcgtggctatgtctactggaaagtctgttggaaagtgggaggtgaaggactgcagaagcttcaaagcactttcaatttgcaagaaaatgagtggaccccttgggcctgaagaagcatcccctaagcctgatgacccctgtcctgaaggctggcagagtttccccgcaagtctttcttgttataaggtattccatgcagaaagaattgtaagaaagaggaactgggaagaagctgaacgattctgccaagcccttggagcacacctttctagcttcagccatgtggatgaaataaaggaatttcttcactttttaacggaccagttcagtggccagcattggctgtggattggtttgaataaaaggagcccagatttacaaggatcctggcaatggagtgatcgtacaccagtgtctactattatcatgccaaatgagtttcagcaggattatgacatcagagactgtgctgctgtcaaggtatttcataggccatggcgaagaggctggcatttctatgatgatagagaatttatttatttgaggccttttgcttgtgatacaaaacttgaatgggtgtgccaaattccaaaaggccgtactccaaaaacaccagactggtacaatccagaccgtgctggaattcatggacctccacttataattgaaggaagtgaatattggtttgttgctgatcttcacctaaactatgaagaagccgtcctgtactgtgccagcaatcacagctttcttgcaactataacatcttttgtgggactaaaagccatcaaaaacaaaatagcaaatatatctggtgatggacagaagtggtggataagaattagcgagtggccaatagatgatcattttacatactcacgatatccatggcaccgctttcctgtgacatttggagaggaatgcttgtacatgtctgccaagacttggcttatcgacttaggtaaaccaacagactgtagtaccaagttgcccttcatctgtgaaaaatataatgtttcttcgttagagaaatacagcccagattctgcagctaaagtgcaatgttctgagcaatggattccttttcagaataagtgttttctaaagatcaaacccgtgtctctcacattttctcaagcaagcgatacctgtcactcctatggtggcacccttccttcagtgttgagccagattgaacaagactttattacatccttgcttccggatatggaagctactttatggattggtttgcgctggactgcctatgaaaagataaacaaatggacagataacagagagctgacgtacagtaactttcacccattattggttagtgggaggctgagaataccagaaaatttttttgaggaagagtctcgctaccactgtgccctaatactcaacctccaaaaatcaccgtttactgggacgtggaattttacatcctgcagtgaacgccactttgtgtctctctgtcagaaatattcagaagttaaaagcagacagacgttgcagaatgcttcagaaactgtaaagtatctaaataatctgtacaaaataatcccaaagactctgacttggcacagtgctaaaagggagtgtctgaaaagtaacatgcagctggtgagcatcacggacccttaccagcaggcattcctcagtgtgcaggcgctccttcacaactcttccttatggatcggactcttcagtcaagatgatgaactcaactttggttggtcagatgggaaacgtcttcattttagtcgctgggctgaaactaatgggcaactcgaagactgtgtagtattagacactgatggattctggaaaacagttgattgcaatgacaatcaaccaggtgctatttgctactattcaggaaatgagactgaaaaagaggtcaaaccagttgacagtgttaaatgtccatctcctgttctaaatactctgtggataccatttcagaactgttgctacaatttcataataacaaagaataggcatatggcaacaacacaggatgaagttcatactaaatgccagaaactgaatccaaaatcacatattctgagtattcgagatgaaaaggagaataactttgttcttgagcaactgctgtacttcaattatatggcttcatgggtcatgttaggaataacttatagaaataagtctcttatgtggtttgataagaccccactgtcatatacacattggagagcaggaagaccaactataaaaaatgagaagtttttggctggtttaagtactgacggcttctgggatattcaaacctttaaagttattgaagaagcagtttattttcaccagcacagcattcttgcttgtaaaattgaaatggttgactacaaagaagaatataatactacactgccacagtttatgccatatgaagatggtatttacagtgttattcaaaaaaaggtaacatggtatgaagcattaaacatgtgttctcaaagtggaggtcacttggcaagcgttcacaaccaaaatggccagctctttctggaagatattgtaaaacgtgatggatttccactatgggttgggctctcaagtcatgatggaagtgaatcaagttttgaatggtctgatggtagtacatttgactatatcccatggaaaggccaaacatctcctggaaattgtgttctcttggatccaaaaggaacttggaaacatgaaaaatgcaactctgttaaggatggtgctatttgttataaacctacaaaatctaaaaagctgtcccgtcttacatattcatcaagatgtccagcagcaaaagagaatgggtcacggtggatccagtacaagggtcactgttacaagtctgatcaggcattgcacagtttttcagaggccaaaaaattgtgttcaaaacatgatcactctgcaactatcgtttccataaaagatgaagatgagaataaatttgtgagcagactgatgagggaaaataataacattaccatgagagtttggcttggattatctcaacattctgttgaccagtcttggagttggttagatggatcagaagtgacatttgtcaaatgggaaaataaaagtaagagtggtgttggaagatgtagcatgttgatagcttcaaatgaaacttggaaaaaagttgaatgtgaacatggttttggaagagttgtctgcaaagtgcctctggactgtccttcatctacttggattcagttccaagacagttgttacatttttctccaagaagccatcaaagtagaaagcatagaggatgtcagaaatcagtgtactgaccatggagcggacatgataagcatacataatgaagaagaaaatgcttttatactggatactttgaaaaagcaatggaaaggcccagatgatatcctactaggcatgttttatgacacagatgatgcgagtttcaagtggtttgataattcaaatatgacatttgataagtggacagaccaagatgatgatgaggatttagttgacacctgtgcttttctgcacatcaagacaggtgaatggaaaaaaggaaattgtgaagtttcttctgtggaaggaacactatgcaaaacagctatcccatacaaaaggaaatatttatcagataaccacattttaatatcagcattggtgattgctagcacggtaattttgacagttttgggagcaatcatttggttcctgtacaaaaaacattctgattctcgtttcaccacagttttttcaaccgcaccccaatcaccttataatgaagactgtgttttggtagttggagaagaaaatgaatatcctgttcaatttgactaa

SEQ ID NO: 16 - RNA, 5482 nt, Homo sapiens
  source 1..5482: mol_type = other RNA
ccggccggaaggcttgcgccagctcaggatgaggacaggctgggcgacccctcgccgcccggcggggctcctcatgctgctcttctggttcttcgatctcgcggagccctctggccgcgcagctaatgaccccttcaccatcgtccatggaaatacgggcaagtgcatcaagccagtgtatggctggatagtagcagacgactgtgatgaaactgaggacaagttatggaagtgggtgtcccagcatcggctctttcatttgcactcccaaaagtgccttggcctcgatattaccaaatcggtaaatgagctgagaatgttcagctgtgactccagtgccatgctgtggtggaaatgtgagcaccactctctgtacggagctgcccggtaccggctggctctgaaggatggacatggcacagcaatctcaaatgcatctgatgtctggaagaaaggaggctcagaggaaagcctttgtgaccagccttatcatgagatctataccagagatgggaactcttatgggagaccttgtgaatttccattcttaattgatgggacctggcatcatgattgcattcttgatgaagatcatagtgggccatggtgtgccaccaccttaaattatgaatatgaccgaaagtggggcatctgcttaaagcctgaaaacggttgtgaagataattgggaaaagaacgagcagtttggaagttgctaccaatttaatactcagacggctctttcttggaaagaagcttatgtttcatgtcagaatcaaggagctgatttactgagcatcaacagtgctgctgaattaacttaccttaaagaaaaagaaggcattgctaagattttctggattggtttaaatcagctatactctgctagaggctgggaatggtcagaccacaaaccattaaactttctcaactgggatccagacaggcccagtgcacctactataggtggctccagctgtgcaagaatggatgctgagtctggtctgtggcagagcttttcctgtgaagctcaactgccctatgtctgcaggaaaccattaaataatacagtggagttaacagatgtctggacatactcagatacccgctgtgatgcaggctggctgccaaataatggattttgctatctgctggtaaatgaaagtaattcctgggataaggcacatgcgaaatgcaaagccttcagtagtgacctaatcagcattcattctctagcagatgtggaggtggttgtcacaaaactccataatgaggatatcaaagaagaagtgtggataggccttaagaacataaacataccaactttatttcagtggtcagatggtactgaagttactctaacatattgggatgagaatgagccaaatgttccctacaataagacgcccaactgtgtttcctacttaggagagctaggtcagtggaaagtccaatcatgtgaggagaaactaaaatatgtatgcaagagaaagggagaaaaactgaatgacgcaagttctgataagatgtgtcctccagatgagggctggaagagacatggagaaacctgttacaagatttatgaggatgaggtcccttttggaacaaactgcaatctgactatcactagcagatttgagcaagaatacctaaatgatttgatgaaaaagtatgataaatctctaagaaaatacttctggactggcctgagagatgtagattcttgtggagagtataactgggcaactgttggtggaagaaggcgggctgtaaccttttccaactggaattttcttgagccagcttccccgggcggctgcgtggctatgtctactggaaagtctgttggaaagtgggaggtgaaggactgcagaagcttcaaagcactttcaatttgcaagaaaatgagtggaccccttgggcctgaagaagcatcccctaagcctgatgacccctgtcctgaaggctggcagagtttccccgcaagtctttcttgttataaggtattccatgcagaaagaattgtaagaaagaggaactgggaagaagctgaacgattctgccaagcccttggagcacacctttctagcttcagccatgtggatgaaataaaggaatttcttcactttttaacggaccagttcagtggccagcattggctgtggattggtttgaataaaaggagcccagatttacaaggatcctggcaatggagtgatcgtacaccagtgtctactattatcatgccaaatgagtttcagcaggattatgacatcagagactgtgctgctgtcaaggtatttcataggccatggcgaagaggctggcatttctatgatgatagagaatttatttatttgaggccttttgcttgtgatacaaaacttgaatgggtgtgccaaattccaaaaggccgtactccaaaaacaccagactggtacaatccagaccgtgctggaattcatggacctccacttataattgaaggaagtgaatattggtttgttgctgatcttcacctaaactatgaagaagccgtcctgtactgtgccagcaatcacagctttcttgcaactataacatcttttgtgggactaaaagccatcaaaaacaaaatagcaaatatatctggtgatggacagaagtggtggataagaattagcgagtggccaatagatgatcattttacatactcacgatatccatggcaccgctttcctgtgacatttggagaggaatgcttgtacatgtctgccaagacttggcttatcgacttaggtaaaccaacagactgtagtaccaagttgcccttcatctgtgaaaaatataatgtttcttcgttagagaaatacagcccagattctgcagctaaagtgcaatgttctgagcaatggattccttttcagaataagtgttttctaaagatcaaacccgtgtctctcacattttctcaagcaagcgatacctgtcactcctatggtggcacccttccttcagtgttgagccagattgaacaagactttattacatccttgcttccggatatggaagctactttatggattggtttgcgctggactgcctatgaaaagataaacaaatggacagataacagagagctgacgtacagtaactttcacccattattggttagtgggaggctgagaataccagaaaatttttttgaggaagagtctcgctaccactgtgccctaatactcaacctccaaaaatcaccgtttactgggacgtggaattttacatcctgcagtgaacgccactttgtgtctctctgtcagaaatattcagaagttaaaagcagacagacgttgcagaatgcttcagaaactgtaaagtatctaaataatctgtacaaaataatcccaaagactctgacttggcacagtgctaaaagggagtgtctgaaaagtaacatgcagctggtgagcatcacggacccttaccagcaggcattcctcagtgtgcaggcgctccttcacaactcttccttatggatcggactcttcagtcaagatgatgaactcaactttggttggtcagatgggaaacgtcttcattttagtcgctgggctgaaactaatgggcaactcgaagactgtgtagtattagacactgatggattctggaaaacagttgattgcaatgacaatcaaccaggtgctatttgctactattcaggaaatgagactgaaaaagaggtcaaaccagttgacagtgttaaatgtccatctcctgttctaaatactctgtggataccatttcagaactgttgctacaatttcataataacaaagaataggcatatggcaacaacacaggatgaagttcatactaaatgccagaaactgaatccaaaatcacatattctgagtattcgagatgaaaaggagaataactttgttcttgagcaactgctgtacttcaattatatggcttcatgggtcatgttaggaataacttatagaaataagtctcttatgtggtttgataagaccccactgtcatatacacattggagagcaggaagaccaactataaaaaatgagaagtttttggctggtttaagtactgacggcttctgggatattcaaacctttaaagttattgaagaagcagtttattttcaccagcacagcattcttgcttgtaaaattgaaatggttgactacaaagaagaatataatactacactgccacagtttatgccatatgaagatggtatttacagtgttattcaaaaaaaggtaacatggtatgaagcattaaacatgtgttctcaaagtggaggtcacttggcaagcgttcacaaccaaaatggccagctctttctggaagatattgtaaaacgtgatggatttccactatgggttgggctctcaagtcatgatggaagtgaatcaagttttgaatggtctgatggtagtacatttgactatatcccatggaaaggccaaacatctcctggaaattgtgttctcttggatccaaaaggaacttggaaacatgaaaaatgcaactctgttaaggatggtgctatttgttataaacctacaaaatctaaaaagctgtcccgtcttacatattcatcaagatgtccagcagcaaaagagaatgggtcacggtggatccagtacaagggtcactgttacaagtctgatcaggcattgcacagtttttcagaggccaaaaaattgtgttcaaaacatgatcactctgcaactatcgtttccataaaagatgaagatgagaataaatttgtgagcagactgatgagggaaaataataacattaccatgagagtttggcttggattatctcaacattctgttgactgtccttcatctacttggattcagttccaagacagttgttacatttttctccaagaagccatcaaagtagaaagcatagaggatgtcagaaatcagtgtactgaccatggagcggacatgataagcatacataatgaagaagaaaatgcttttatactggatactttgaaaaagcaatggaaaggcccagatgatatcctactaggcatgttttatgacacagatgatgcgagtttcaagtggtttgataattcaaatatgacatttgataagtggacagaccaagatgatgatgaggatttagttgacacctgtgcttttctgcacatcaagacaggtgaatggaaaaaaggaaattgtgaagtttcttctgtggaaggaacactatgcaaaacagctatcccatacaaaaggaaatatttatcagataaccacattttaatatcagcattggtgattgctagcacggtaattttgacagttttgggagcaatcatttggttcctgtacaaaaaacattctgattctcgtttcaccacagttttttcaaccgcaccccaatcaccttataatgaagactgtgttttggtagttggagaagaaaatgaatatcctgttcaatttgactaa

SEQ ID NO: 17 - RNA, 8919 nt, Homo sapiens
  source 1..8919: mol_type = other RNA
aggccgcgctcagcaggcggggcgggagccgcgtgcgcccgaggacccggccggaaggcttgcgccagctcaggatgaggacaggctgggcgacccctcgccgcccggcggggctcctcatgctgctcttctggttcttcgatctcgcggagccctctggccgcgcagctaatgaccccttcaccatcgtccatggaaatacgggcaagtgcatcaagccagtgtatggctggatagtagcagacgactgtgatgaaactgaggacaagttatggaagtgggtgtcccagcatcggctctttcatttgcactcccaaaagtgccttggcctcgatattaccaaatcggtaaatgagctgagaatgttcagctgtgactccagtgccatgctgtggtggaaatgtgagcaccactctctgtacggagctgcccggtaccggctggctctgaaggatggacatggcacagcaatctcaaatgcatctgatgtctggaagaaaggaggctcagaggaaagcctttgtgaccagccttatcatgagatctataccagagatgggaactcttatgggagaccttgtgaatttccattcttaattgatgggacctggcatcatgattgcattcttgatgaagatcatagtgggccatggtgtgccaccaccttaaattatgaatatgaccgaaagtggggcatctgcttaaagcctgaaaacggttgtgaagataattgggaaaagaacgagcagtttggaagttgctaccaatttaatactcagacggctctttcttggaaagaagcttatgtttcatgtcagaatcaaggagctgatttactgagcatcaacagtgctgctgaattaacttaccttaaagaaaaagaaggcattgctaagattttctggattggtttaaatcagctatactctgctagaggctgggaatggtcagaccacaaaccattaaactttctcaactgggatccagacaggcccagtgcacctactataggtggctccagctgtgcaagaatggatgctgagtctggtctgtggcagagcttttcctgtgaagctcaactgccctatgtctgcaggaaaccattaaataatacagtggagttaacagatgtctggacatactcagatacccgctgtgatgcaggctggctgccaaataatggattttgctatctgctggtaaatgaaagtaattcctgggataaggcacatgcgaaatgcaaagccttcagtagtgacctaatcagcattcattctctagcagatgtggaggtggttgtcacaaaactccataatgaggatatcaaagaagaagtgtggataggccttaagaacataaacataccaactttatttcagtggtcagatggtactgaagttactctaacatattgggatgagaatgagccaaatgttccctacaataagacgcccaactgtgtttcctacttaggagagctaggtcagtggaaagtccaatcatgtgaggagaaactaaaatatgtatgcaagagaaagggagaaaaactgaatgacgcaagttctgataagatgtgtcctccagatgagggctggaagagacatggagaaacctgttacaagatttatgaggatgaggtcccttttggaacaaactgcaatctgactatcactagcagatttgagcaagaatacctaaatgatttgatgaaaaagtatgataaatctctaagaaaatacttctggactggcctgagagatgtagattcttgtggagagtataactgggcaactgttggtggaagaaggcgggctgtaaccttttccaactggaattttcttgagccagcttccccgggcggctgcgtggctatgtctactggaaagtctgttggaaagtgggaggtgaaggactgcagaagcttcaaagcactttcaatttgcaagaaaatgagtggaccccttgggcctgaagaagcatcccctaagcctgatgacccctgtcctgaaggctggcagagtttccccgcaagtctttcttgttataaggtattccatgcagaaagaattgtaagaaagaggaactgggaagaagctgaacgattctgccaagcccttggagcacacctttctagcttcagccatgtggatgaaataaaggaatttcttcactttttaacggaccagttcagtggccagcattggctgtggattggtttgaataaaaggagcccagatttacaaggatcctggcaatggagtgatcgtacaccagtgtctactattatcatgccaaatgagtttcagcaggattatgacatcagagactgtgctgctgtcaaggtatttcataggccatggcgaagaggctggcatttctatgatgatagagaatttatttatttgaggccttttgcttgtgatacaaaacttgaatgggtgtgccaaattccaaaaggccgtactccaaaaacaccagactggtacaatccagaccgtgctggaattcatggacctccacttataattgaaggaagtgaatattggtttgttgctgatcttcacctaaactatgaagaagccgtcctgtactgtgccagcaatcacagctttcttgcaactataacatcttttgtgggactaaaagccatcaaaaacaaaatagcaaatatatctggtgatggacagaagtggtggataagaattagcgagtggccaatagatgatcattttacatactcacgatatccatggcaccgctttcctgtgacatttggagaggaatgcttgtacatgtctgccaagacttggcttatcgacttaggtaaaccaacagactgtagtaccaagttgcccttcatctgtgaaaaatataatgtttcttcgttagagaaatacagcccagattctgcagctaaagtgcaatgttctgagcaatggattccttttcagaataagtgttttctaaagatcaaacccgtgtctctcacattttctcaagcaagcgatacctgtcactcctatggtggcacccttccttcagtgttgagccagattgaacaagactttattacatccttgcttccggatatggaagctactttatggattggtttgcgctggactgcctatgaaaagataaacaaatggacagataacagagagctgacgtacagtaactttcacccattattggttagtgggaggctgagaataccagaaaatttttttgaggaagagtctcgctaccactgtgccctaatactcaacctccaaaaatcaccgtttactgggacgtggaattttacatcctgcagtgaacgccactttgtgtctctctgtcagaaatattcagaagttaaaagcagacagacgttgcagaatgcttcagaaactgtaaagtatctaaataatctgtacaaaataatcccaaagactctgacttggcacagtgctaaaagggagtgtctgaaaagtaacatgcagctggtgagcatcacggacccttaccagcaggcattcctcagtgtgcaggcgctccttcacaactcttccttatggatcggactcttcagtcaagatgatgaactcaactttggttggtcagatgggaaacgtcttcattttagtcgctgggctgaaactaatgggcaactcgaagactgtgtagtattagacactgatggattctggaaaacagttgattgcaatgacaatcaaccaggtgctatttgctactattcaggaaatgagactgaaaaagaggtcaaaccagttgacagtgttaaatgtccatctcctgttctaaatactctgtggataccatttcagaactgttgctacaatttcataataacaaagaataggcatatggcaacaacacaggatgaagttcatactaaatgccagaaactgaatccaaaatcacatattctgagtattcgagatgaaaaggagaataactttgttcttgagcaactgctgtacttcaattatatggcttcatgggtcatgttaggaataacttatagaaataagtctcttatgtggtttgataagaccccactgtcatatacacattggagagcaggaagaccaactataaaaaatgagaagtttttggctggtttaagtactgacggcttctgggatattcaaacctttaaagttattgaagaagcagtttattttcaccagcacagcattcttgcttgtaaaattgaaatggttgactacaaagaagaatataatactacactgccacagtttatgccatatgaagatggtatttacagtgttattcaaaaaaaggtaacatggtatgaagcattaaacatgtgttctcaaagtggaggtcacttggcaagcgttcacaaccaaaatggccagctctttctggaagatattgtaaaacgtgatggatttccactatgggttgggctctcaagtcatgatggaagtgaatcaagttttgaatggtctgatggtagtacatttgactatatcccatggaaaggccaaacatctcctggaaattgtgttctcttggatccaaaaggaacttggaaacatgaaaaatgcaactctgttaaggatggtgctatttgttataaacctacaaaatctaaaaagctgtcccgtcttacatattcatcaagatgtccagcagcaaaagagaatgggtcacggtggatccagtacaagggtcactgttacaagtctgatcaggcattgcacagtttttcagaggccaaaaaattgtgttcaaaacatgatcactctgcaactatcgtttccataaaagatgaagatgagaataaatttgtgagcagactgatgagggaaaataataacattaccatgagagtttggcttggattatctcaacattctgttgaccagtcttggagttggttagatggatcagaagtgacatttgtcaaatgggaaaataaaagtaagagtggtgttggaagatgtagcatgttgatagcttcaaatgaaacttggaaaaaagttgaatgtgaacatggttttggaagagttgtctgcaaagtgcctctggactgtccttcatctacttggattcagttccaagacagttgttacatttttctccaagaagccatcaaagtagaaagcatagaggatgtcagaaatcagtgtactgaccatggagcggacatgataagcatacataatgaagaagaaaatgcttttatactggatactttgaaaaagcaatggaaaggcccagatgatatcctactaggcatgttttatgacacagatgatgcgagtttcaagtggtttgataattcaaatatgacatttgataagtggacagaccaagatgatgatgaggatttagttgacacctgtgcttttctgcacatcaagacaggtgaatggaaaaaaggaaattgtgaagtttcttctgtggaaggaacactatgcaaaacagctatcccatacaaaaggaaatatttatcagataaccacattttaatatcagcattggtgattgctagcacggtaattttgacagttttgggagcaatcatttggttcctgtacaaaaaacattctgattctcgtttcaccacagttttttcaaccgcaccccaatcaccttataatgaagactgtgttttggtagttggagaagaaaatgaatatcctgttcaatttgactaagtttttggtaatcttgcactaagacatcaacaaaatgccctggcagagataacttgggaaagattttaatataaaacttgacattggatattagagctttaatggtattccttattccagtaacatttttatgtactcatctgctgtgaaaagtctttaggttcattaaaaaaacaggttttagaaatgatcttagatctaatatagtgattttaagcatcccgtcaaaggcagaatctgtcacttgaatgaaggaaagcttaaagcccaagcagataaaaataaaagcccagcctatttgtcttgcctgctgtatcttccctatttagttgacccactttagtttatatgtttattagtaaacatgaaatggggaataagtgattttaagtacatcccatacatttaaatatctttgataattgttatttttttggcagataattcctctagaatgtgtatctttttatgatttagatgaagaaaattttacaacttttaacaccccacaccaattttagtttcattacttttacacacaccattttatcacaaatgactcaagttttaatgaatgtttataaattatttgaaacaaaatatgatcgctgtgtccaggatggcatagagaaagctggcaattaggttaacacttacatattatagtgcccctttaaggatttctctcttgccaccataccttttgtactttcccctatacaagatgtatctcattctcctcaagcatttataaatttttccttcaatgacatgaaaactgtgcaagcaaaaaccgaagaaaaacacttaagtacaactgtagtgacagtgatcaaagttttcagtgcatttattgtacattttaagaaaaaggtgaaaatcatttggggagtaaaaaaatgaaaaagctgaaacgagtaattttcctcaccatcaataaaccaaaaacaggaaagataaagaatgtataaatttcacgtaaattagtcacgtatcacttatcaatggggatacgttctaagaaatgcatagttagggaatcttgtgtgaaaatcagcttgtatttacacaaacccagatggtagagcctattttgtcccaaacctacacagcatgttactgtgctgaatactgcagacaattgtaacacaatatttgtgtatctaaatatagaaaaggtacagtaaaaatatggtctactaaggaaacactgttctatatgtggtccattactgactgaagtatactgtctagaagtctgaggctcaaagaaaagtaatccctcttctgaatccacaccccatcaattatcttactttcttctggggagatagatagatatactatctcactagcttgactaatggcaacaaagttccagcttgtgtagtctctttttattgaccacatgaatcgaaaacactcatcacaattaatggcactatcattaatgagacatgagtaactaaaaagtgatagaaaactattaacagtgcggctacatggtactgaaaatgcaggcattacaccagctgttacacaagcacaagcatgctctgtaagagctttacatttctgagattttgtatagtgattgagatgtctattttattattgatagactattactaatgtcaatattgaacactaccctggaattcctgcctggttttcctacccaaattgtaccactccttgaagaactacaggcacagtaaaaaaaatatggcgtattatgtgaactaaaagagttctaaaggagttcttaaaggagtggtagaatttgggtaggaaagtgattaagtccaacttaaaaccaacagtctcaaacgtctacaactacaatgtccaatgagccactagccacatgaggctatttaagtaaatttagtttaaaatccagttttcgaattacattagccacattgtcaagtgttcaaatcacaggtggttagtggctactgtactgggcaacatacattatagaacattttcattataggaagttttattgggcagtgctgctcttaaatcctaccttccactcaactcccatacaactttcttttgtacattttgatactttctacctaatggcagctcttccaaaatagctgctttaaactctgatttaattttcaatatttggtttcatttttcaacaggccaagaggcctctggtaatgaagtgctatatatatatatatgatggagtctcactgtgctgcccaggctacagtgcagtggctcgatcttggctctctccaatctccgccttgcaggttttcaagcaattctcctgcctcagcctccttagtagctgggaccacagacatctgtcaccacacccagctaactttttgtatttttggtagagacggggtttcgccatattgactgggctggtctcaaactcctgacctcaagtgatccacccaccttggtctcccaaagtgctgggattacatgcgtgagccaccacacttggcctacattttttctttatataccagaacatctataacaggcaccttatctactcattagtgaagagataattggattacacaggcaggcttgtttactacatccagaatgtagaaactgctttcttcaacatcttggttctagctagtaataacaatataattctttggcagatattcagaataacattttaaactacattttcttagaaaattgcattcttgtagtgagcagtgtatggtctcttttgttcagaatttaaaactgataaccaatgaaagccttttctcttattcctctaccgtcatttacatgataatctgaagctaatatgacaatatttaaatactaagtggtactagggaactacaagaatactgtaaagcttaagccattgttatcactgtcatttagcatttaataacaaaactatacagaattatgtgcataccaatgaatgttttgtaccatctagttaaattttttaaataaagttttatgggttaagcagaagacaactgtcatactgaattttattaaaagtatatatacttcaaattcaaagcatcccttaggacccacagaatatattaaaactaccacccttaaattttatatttttgctttaagacagacaatgcaaaggtaactggcaagaggtgagcaaatgttttagaacatttatattattgcttaaaatgagatttgaaattgtaataaaattcttggttatgaa

SEQ ID NO: 18 - RNA, 8751 nt, Homo sapiens
  source 1..8751: mol_type = other RNA
aggccgcgctcagcaggcggggcgggagccgcgtgcgcccgaggacccggccggaaggcttgcgccagctcaggatgaggacaggctgggcgacccctcgccgcccggcggggctcctcatgctgctcttctggttcttcgatctcgcggagccctctggccgcgcagctaatgaccccttcaccatcgtccatggaaatacgggcaagtgcatcaagccagtgtatggctggatagtagcagacgactgtgatgaaactgaggacaagttatggaagtgggtgtcccagcatcggctctttcatttgcactcccaaaagtgccttggcctcgatattaccaaatcggtaaatgagctgagaatgttcagctgtgactccagtgccatgctgtggtggaaatgtgagcaccactctctgtacggagctgcccggtaccggctggctctgaaggatggacatggcacagcaatctcaaatgcatctgatgtctggaagaaaggaggctcagaggaaagcctttgtgaccagccttatcatgagatctataccagagatgggaactcttatgggagaccttgtgaatttccattcttaattgatgggacctggcatcatgattgcattcttgatgaagatcatagtgggccatggtgtgccaccaccttaaattatgaatatgaccgaaagtggggcatctgcttaaagcctgaaaacggttgtgaagataattgggaaaagaacgagcagtttggaagttgctaccaatttaatactcagacggctctttcttggaaagaagcttatgtttcatgtcagaatcaaggagctgatttactgagcatcaacagtgctgctgaattaacttaccttaaagaaaaagaaggcattgctaagattttctggattggtttaaatcagctatactctgctagaggctgggaatggtcagaccacaaaccattaaactttctcaactgggatccagacaggcccagtgcacctactataggtggctccagctgtgcaagaatggatgctgagtctggtctgtggcagagcttttcctgtgaagctcaactgccctatgtctgcaggaaaccattaaataatacagtggagttaacagatgtctggacatactcagatacccgctgtgatgcaggctggctgccaaataatggattttgctatctgctggtaaatgaaagtaattcctgggataaggcacatgcgaaatgcaaagccttcagtagtgacctaatcagcattcattctctagcagatgtggaggtggttgtcacaaaactccataatgaggatatcaaagaagaagtgtggataggccttaagaacataaacataccaactttatttcagtggtcagatggtactgaagttactctaacatattgggatgagaatgagccaaatgttccctacaataagacgcccaactgtgtttcctacttaggagagctaggtcagtggaaagtccaatcatgtgaggagaaactaaaatatgtatgcaagagaaagggagaaaaactgaatgacgcaagttctgataagatgtgtcctccagatgagggctggaagagacatggagaaacctgttacaagatttatgaggatgaggtcccttttggaacaaactgcaatctgactatcactagcagatttgagcaagaatacctaaatgatttgatgaaaaagtatgataaatctctaagaaaatacttctggactggcctgagagatgtagattcttgtggagagtataactgggcaactgttggtggaagaaggcgggctgtaaccttttccaactggaattttcttgagccagcttccccgggcggctgcgtggctatgtctactggaaagtctgttggaaagtgggaggtgaaggactgcagaagcttcaaagcactttcaatttgcaagaaaatgagtggaccccttgggcctgaagaagcatcccctaagcctgatgacccctgtcctgaaggctggcagagtttccccgcaagtctttcttgttataaggtattccatgcagaaagaattgtaagaaagaggaactgggaagaagctgaacgattctgccaagcccttggagcacacctttctagcttcagccatgtggatgaaataaaggaatttcttcactttttaacggaccagttcagtggccagcattggctgtggattggtttgaataaaaggagcccagatttacaaggatcctggcaatggagtgatcgtacaccagtgtctactattatcatgccaaatgagtttcagcaggattatgacatcagagactgtgctgctgtcaaggtatttcataggccatggcgaagaggctggcatttctatgatgatagagaatttatttatttgaggccttttgcttgtgatacaaaacttgaatgggtgtgccaaattccaaaaggccgtactccaaaaacaccagactggtacaatccagaccgtgctggaattcatggacctccacttataattgaaggaagtgaatattggtttgttgctgatcttcacctaaactatgaagaagccgtcctgtactgtgccagcaatcacagctttcttgcaactataacatcttttgtgggactaaaagccatcaaaaacaaaatagcaaatatatctggtgatggacagaagtggtggataagaattagcgagtggccaatagatgatcattttacatactcacgatatccatggcaccgctttcctgtgacatttggagaggaatgcttgtacatgtctgccaagacttggcttatcgacttaggtaaaccaacagactgtagtaccaagttgcccttcatctgtgaaaaatataatgtttcttcgttagagaaatacagcccagattctgcagctaaagtgcaatgttctgagcaatggattccttttcagaataagtgttttctaaagatcaaacccgtgtctctcacattttctcaagcaagcgatacctgtcactcctatggtggcacccttccttcagtgttgagccagattgaacaagactttattacatccttgcttccggatatggaagctactttatggattggtttgcgctggactgcctatgaaaagataaacaaatggacagataacagagagctgacgtacagtaactttcacccattattggttagtgggaggctgagaataccagaaaatttttttgaggaagagtctcgctaccactgtgccctaatactcaacctccaaaaatcaccgtttactgggacgtggaattttacatcctgcagtgaacgccactttgtgtctctctgtcagaaatattcagaagttaaaagcagacagacgttgcagaatgcttcagaaactgtaaagtatctaaataatctgtacaaaataatcccaaagactctgacttggcacagtgctaaaagggagtgtctgaaaagtaacatgcagctggtgagcatcacggacccttaccagcaggcattcctcagtgtgcaggcgctccttcacaactcttccttatggatcggactcttcagtcaagatgatgaactcaactttggttggtcagatgggaaacgtcttcattttagtcgctgggctgaaactaatgggcaactcgaagactgtgtagtattagacactgatggattctggaaaacagttgattgcaatgacaatcaaccaggtgctatttgctactattcaggaaatgagactgaaaaagaggtcaaaccagttgacagtgttaaatgtccatctcctgttctaaatactctgtggataccatttcagaactgttgctacaatttcataataacaaagaataggcatatggcaacaacacaggatgaagttcatactaaatgccagaaactgaatccaaaatcacatattctgagtattcgagatgaaaaggagaataactttgttcttgagcaactgctgtacttcaattatatggcttcatgggtcatgttaggaataacttatagaaataagtctcttatgtggtttgataagaccccactgtcatatacacattggagagcaggaagaccaactataaaaaatgagaagtttttggctggtttaagtactgacggcttctgggatattcaaacctttaaagttattgaagaagcagtttattttcaccagcacagcattcttgcttgtaaaattgaaatggttgactacaaagaagaatataatactacactgccacagtttatgccatatgaagatggtatttacagtgttattcaaaaaaaggtaacatggtatgaagcattaaacatgtgttctcaaagtggaggtcacttggcaagcgttcacaaccaaaatggccagctctttctggaagatattgtaaaacgtgatggatttccactatgggttgggctctcaagtcatgatggaagtgaatcaagttttgaatggtctgatggtagtacatttgactatatcccatggaaaggccaaacatctcctggaaattgtgttctcttggatccaaaaggaacttggaaacatgaaaaatgcaactctgttaaggatggtgctatttgttataaacctacaaaatctaaaaagctgtcccgtcttacatattcatcaagatgtccagcagcaaaagagaatgggtcacggtggatccagtacaagggtcactgttacaagtctgatcaggcattgcacagtttttcagaggccaaaaaattgtgttcaaaacatgatcactctgcaactatcgtttccataaaagatgaagatgagaataaatttgtgagcagactgatgagggaaaataataacattaccatgagagtttggcttggattatctcaacattctgttgactgtccttcatctacttggattcagttccaagacagttgttacatttttctccaagaagccatcaaagtagaaagcatagaggatgtcagaaatcagtgtactgaccatggagcggacatgataagcatacataatgaagaagaaaatgcttttatactggatactttgaaaaagcaatggaaaggcccagatgatatcctactaggcatgttttatgacacagatgatgcgagtttcaagtggtttgataattcaaatatgacatttgataagtggacagaccaagatgatgatgaggatttagttgacacctgtgcttttctgcacatcaagacaggtgaatggaaaaaaggaaattgtgaagtttcttctgtggaaggaacactatgcaaaacagctatcccatacaaaaggaaatatttatcagataaccacattttaatatcagcattggtgattgctagcacggtaattttgacagttttgggagcaatcatttggttcctgtacaaaaaacattctgattctcgtttcaccacagttttttcaaccgcaccccaatcaccttataatgaagactgtgttttggtagttggagaagaaaatgaatatcctgttcaatttgactaagtttttggtaatcttgcactaagacatcaacaaaatgccctggcagagataacttgggaaagattttaatataaaacttgacattggatattagagctttaatggtattccttattccagtaacatttttatgtactcatctgctgtgaaaagtctttaggttcattaaaaaaacaggttttagaaatgatcttagatctaatatagtgattttaagcatcccgtcaaaggcagaatctgtcacttgaatgaaggaaagcttaaagcccaagcagataaaaataaaagcccagcctatttgtcttgcctgctgtatcttccctatttagttgacccactttagtttatatgtttattagtaaacatgaaatggggaataagtgattttaagtacatcccatacatttaaatatctttgataattgttatttttttggcagataattcctctagaatgtgtatctttttatgatttagatgaagaaaattttacaacttttaacaccccacaccaattttagtttcattacttttacacacaccattttatcacaaatgactcaagttttaatgaatgtttataaattatttgaaacaaaatatgatcgctgtgtccaggatggcatagagaaagctggcaattaggttaacacttacatattatagtgcccctttaaggatttctctcttgccaccataccttttgtactttcccctatacaagatgtatctcattctcctcaagcatttataaatttttccttcaatgacatgaaaactgtgcaagcaaaaaccgaagaaaaacacttaagtacaactgtagtgacagtgatcaaagttttcagtgcatttattgtacattttaagaaaaaggtgaaaatcatttggggagtaaaaaaatgaaaaagctgaaacgagtaattttcctcaccatcaataaaccaaaaacaggaaagataaagaatgtataaatttcacgtaaattagtcacgtatcacttatcaatggggatacgttctaagaaatgcatagttagggaatcttgtgtgaaaatcagcttgtatttacacaaacccagatggtagagcctattttgtcccaaacctacacagcatgttactgtgctgaatactgcagacaattgtaacacaatatttgtgtatctaaatatagaaaaggtacagtaaaaatatggtctactaaggaaacactgttctatatgtggtccattactgactgaagtatactgtctagaagtctgaggctcaaagaaaagtaatccctcttctgaatccacaccccatcaattatcttactttcttctggggagatagatagatatactatctcactagcttgactaatggcaacaaagttccagcttgtgtagtctctttttattgaccacatgaatcgaaaacactcatcacaattaatggcactatcattaatgagacatgagtaactaaaaagtgatagaaaactattaacagtgcggctacatggtactgaaaatgcaggcattacaccagctgttacacaagcacaagcatgctctgtaagagctttacatttctgagattttgtatagtgattgagatgtctattttattattgatagactattactaatgtcaatattgaacactaccctggaattcctgcctggttttcctacccaaattgtaccactccttgaagaactacaggcacagtaaaaaaaatatggcgtattatgtgaactaaaagagttctaaaggagttcttaaaggagtggtagaatttgggtaggaaagtgattaagtccaacttaaaaccaacagtctcaaacgtctacaactacaatgtccaatgagccactagccacatgaggctatttaagtaaatttagtttaaaatccagttttcgaattacattagccacattgtcaagtgttcaaatcacaggtggttagtggctactgtactgggcaacatacattatagaacattttcattataggaagttttattgggcagtgctgctcttaaatcctaccttccactcaactcccatacaactttcttttgtacattttgatactttctacctaatggcagctcttccaaaatagctgctttaaactctgatttaattttcaatatttggtttcatttttcaacaggccaagaggcctctggtaatgaagtgctatatatatatatatgatggagtctcactgtgctgcccaggctacagtgcagtggctcgatcttggctctctccaatctccgccttgcaggttttcaagcaattctcctgcctcagcctccttagtagctgggaccacagacatctgtcaccacacccagctaactttttgtatttttggtagagacggggtttcgccatattgactgggctggtctcaaactcctgacctcaagtgatccacccaccttggtctcccaaagtgctgggattacatgcgtgagccaccacacttggcctacattttttctttatataccagaacatctataacaggcaccttatctactcattagtgaagagataattggattacacaggcaggcttgtttactacatccagaatgtagaaactgctttcttcaacatcttggttctagctagtaataacaatataattctttggcagatattcagaataacattttaaactacattttcttagaaaattgcattcttgtagtgagcagtgtatggtctcttttgttcagaatttaaaactgataaccaatgaaagccttttctcttattcctctaccgtcatttacatgataatctgaagctaatatgacaatatttaaatactaagtggtactagggaactacaagaatactgtaaagcttaagccattgttatcactgtcatttagcatttaataacaaaactatacagaattatgtgcataccaatgaatgttttgtaccatctagttaaattttttaaataaagttttatgggttaagcagaagacaactgtcatactgaattttattaaaagtatatatacttcaaattcaaagcatcccttaggacccacagaatatattaaaactaccacccttaaattttatatttttgctttaagacagacaatgcaaaggtaactggcaagaggtgagcaaatgttttagaacatttatattattgcttaaaatgagatttgaaattgtaataaaattcttggttatgaa

SEQ ID NO: 19 - RNA, 5622 nt, Homo sapiens
  source 1..5622: mol_type = other RNA
atgaggacaggctgggcgacccctcgccgcccggcggggctcctcatgctgctcttctggttcttcgatctcgcggagccctctggccgcgcagctaatgaccccttcaccatcgtccatggaaatacgggcaagtgcatcaagccagtgtatggctggatagtagcagacgactgtgatgaaactgaggacaagttatggaagtgggtgtcccagcatcggctctttcatttgcactcccaaaagtgccttggcctcgatattaccaaatcggtaaatgagctgagaatgttcagctgtgactccagtgccatgctgtggtggaaatgtgagcaccactctctgtacggagctgcccggtaccggctggctctgaaggatggacatggcacagcaatctcaaatgcatctgatgtctggaagaaaggaggctcagaggaaagcctttgtgaccagccttatcatgagatctataccagagatgggaactcttatgggagaccttgtgaatttccattcttaattgatgggacctggcatcatgattgcattcttgatgaagatcatagtgggccatggtgtgccaccaccttaaattatgaatatgaccgaaagtggggcatctgcttaaagcctgaaaacggttgtgaagataattgggaaaagaacgagcagtttggaagttgctaccaatttaatactcagacggctctttcttggaaagaagcttatgtttcatgtcagaatcaaggagctgatttactgagcatcaacagtgctgctgaattaacttaccttaaagaaaaagaaggcattgctaagattttctggattggtttaaatcagctatactctgctagaggctgggaatggtcagaccacaaaccattaaactttctcaactgggatccagacaggcccagtgcacctactataggtggctccagctgtgcaagaatggatgctgagtctggtctgtggcagagcttttcctgtgaagctcaactgccctatgtctgcaggaaaccattaaataatacagtggagttaacagatgtctggacatactcagatacccgctgtgatgcaggctggctgccaaataatggattttgctatctgctggtaaatgaaagtaattcctgggataaggcacatgcgaaatgcaaagccttcagtagtgacctaatcagcattcattctctagcagatgtggaggtggttgtcacaaaactccataatgaggatatcaaagaagaagtgtggataggccttaagaacataaacataccaactttatttcagtggtcagatggtactgaagttactctaacatattgggatgagaatgagccaaatgttccctacaataagacgcccaactgtgtttcctacttaggagagctaggtcagtggaaagtccaatcatgtgaggagaaactaaaatatgtatgcaagagaaagggagaaaaactgaatgacgcaagttctgataagatgtgtcctccagatgagggctggaagagacatggagaaacctgttacaagatttatgaggatgaggtcccttttggaacaaactgcaatctgactatcactagcagatttgagcaagaatacctaaatgatttgatgaaaaagtatgataaatctctaagaaaatacttctggactggcctgagagatgtagattcttgtggagagtataactgggcaactgttggtggaagaaggcgggctgtaaccttttccaactggaattttcttgagccagcttccccgggcggctgcgtggctatgtctactggaaagtctgttggaaagtgggaggtgaaggactgcagaagcttcaaagcactttcaatttgcaagaaaatgagtggaccccttgggcctgaagaagcatcccctaagcctgatgacccctgtcctgaaggctggcagagtttccccgcaagtctttcttgttataaggtattccatgcagaaagaattgtaagaaagaggaactgggaagaagctgaacgattctgccaagcccttggagcacacctttctagcttcagccatgtggatgaaataaaggaatttcttcactttttaacggaccagttcagtggccagcattggctgtggattggtttgaataaaaggagcccagatttacaaggatcctggcaatggagtgatcgtacaccagtgtctactattatcatgccaaatgagtttcagcaggattatgacatcagagactgtgctgctgtcaaggtatttcataggccatggcgaagaggctggcatttctatgatgatagagaatttatttatttgaggccttttgcttgtgatacaaaacttgaatgggtgtgccaaattccaaaaggccgtactccaaaaacaccagactggtacaatccagaccgtgctggaattcatggacctccacttataattgaaggaagtgaatattggtttgttgctgatcttcacctaaactatgaagaagccgtcctgtactgtgccagcaatcacagctttcttgcgactataacatcttttgtgggactaaaagccatcaaaaacaaaatagcaaatatatctggtgatggacagaagtggtggataagaattagcgagtggccaatagatgatcattttacatactcacgatatccatggcaccgctttcctgtgacatttggagaggaatgcttgtacatgtctgccaagacttggcttatcgacttaggtaaaccaacagactgtagtaccaagttgcccttcatctgtgaaaaatataatgtttcttcgttagagaaatacagcccagattctgcagctaaagtgcaatgttctgagcaatggattccttttcagaataagtgttttctaaagatcaaacccgtgtctctcacattttctcaagcaagcgatacctgtcactcctatggtggcacccttccttcagtgttgagccagattgaacaagactttattacatccttgcttccggatatggaagctactttatggattggtttgcgctggactgcctatgaaaagataaacaaatggacagataacagagagctgacgtacagtaactttcacccattattggttagtgggaggctgagaataccagaaaatttttttgaggaagagtctcgctaccactgtgccctaatactcaacctccaaaaatcaccgtttactgggacgtggaattttacatcctgcagtgaacgccactttgtgtctctctgtcagaaatattcagaagttaaaagcagacagacgttgcagaatgcttcagaaactgtaaagtatctaaataatctgtacaaaataatcccaaagactctgacttggcacagtgctaaaagggagtgtctgaaaagtaacatgcagctggtgagcatcacggacccttaccagcaggcattcctcagtgtgcaggcgctccttcacaactcttccttatggatcggactcttcagtcaagatgatgaactcaactttggttggtcagatgggaaacgtcttcattttagtcgctgggctgaaactaatgggcaactcgaagactgtgtagtattagacactgatggattctggaaaacagttgattgcaatgacaatcaaccaggtgctatttgctactattcaggaaatgagactgaaaaagaggtcaaaccagttgacagtgttaaatgtccatctcctgttctaaatactctgtggataccatttcagaactgttgctacaatttcataataacaaagaataggcatatggcaacaacacaggatgaagttcatactaaatgccagaaactgaatccaaaatcacatattctgagtattcgagatgaaaaggagaataactttgttcttgagcaactgctgtacttcaattatatggcttcatgggtcatgttaggaataacttatagaaataattctcttatgtggtttgataagaccccactgtcatatacacattggagagcaggaagaccaactataaaaaatgagaagtttttggctggtttaagtactgacggcttctgggatattcaaacctttaaagttattgaagaagcagtttattttcaccagcacagcattcttgcttgtaaaattgaaatggttgactacaaagaagaacataatactacactgccacagtttatgccatatgaagatggtatttacagtgttattcaaaaaaaggtaacatggtatgaagcattaaacatgtgttctcaaagtggaggtcacttggcaagcgttcacaaccaaaatggccagctctttctggaagatattgtaaaacgtgatggatttccactatgggttgggctctcaagtcatgatggaagtgaatcaagttttgaatggtctgatggtagtacatttgactatatcccatggaaaggccaaacatctcctggaaattgtgttctcttggatccaaaaggaacttggaaacatgaaaaatgcaactctgttaaggatggtgctatttgttataaacctacaaaatctaaaaagctgtcccgtcttacatattcatcaagatgtccagcagcaaaagagaatgggtcacggtggatccagtacaagggtcactgttacaagtctgatcaggcattgcacagtttttcagaggccaaaaaattgtgttcaaaacatgatcactctgcaactatcgtttccataaaagatgaagatgagaataaatttgtgagcagactgatgagggaaaataataacattaccatgagagtttggcttggattatctcaacattctgttgaccagtcttggagttggttagatggatcagaagtgacatttgtcaaatgggaaaataaaagtaagagtggtgttggaagatgtagcatgttgatagcttcaaatgaaacttggaaaaaagttgaatgtgaacatggttttggaagagttgtctgcaaagtgcctctggactgtccttcatctacttggattcagttccaagacagttgttacatttttctccaagaagccatcaaagtagaaagcatagaggatgtcagaaatcagtgtactgaccatggagcggacatgataagcatacataatgaagaagaaaatgcttttatactggatactttgaaaaagcaatggaaaggcccagatgatatcctactaggcatgttttatgacacagatgatgcgagtttcaagtggtttgataattcaaatatgacatttgataagtggacagaccaagatgatgatgaggatttagttgacacctgtgcttttctgcacatcaagacaggtgaatggaaaaaaggaaattgtgaagtttcttctgtggaaggaacactatgcaaaacagctatcccatacaaaaggaaatatttatcagataaccacattttaatatcagcattggtgattgctagcacggtaattttgacagttttgggagcaatcatttggttcctgtacaaaaaacattctgattctcgtttcaccacagttttttcaaccgcaccccaatcaccttataatgaagactgtgttttggtagttggagaagaaaatgaatatcctgttcaatttgactaa

SEQ ID NO: 20 - RNA, 5454 nt, Homo sapiens
  source 1..5454: mol_type = other RNA
atgaggacaggctgggcgacccctcgccgcccggcggggctcctcatgctgctcttctggttcttcgatctcgcggagccctctggccgcgcagctaatgaccccttcaccatcgtccatggaaatacgggcaagtgcatcaagccagtgtatggctggatagtagcagacgactgtgatgaaactgaggacaagttatggaagtgggtgtcccagcatcggctctttcatttgcactcccaaaagtgccttggcctcgatattaccaaatcggtaaatgagctgagaatgttcagctgtgactccagtgccatgctgtggtggaaatgtgagcaccactctctgtacggagctgcccggtaccggctggctctgaaggatggacatggcacagcaatctcaaatgcatctgatgtctggaagaaaggaggctcagaggaaagcctttgtgaccagccttatcatgagatctataccagagatgggaactcttatgggagaccttgtgaatttccattcttaattgatgggacctggcatcatgattgcattcttgatgaagatcatagtgggccatggtgtgccaccaccttaaattatgaatatgaccgaaagtggggcatctgcttaaagcctgaaaacggttgtgaagataattgggaaaagaacgagcagtttggaagttgctaccaatttaatactcagacggctctttcttggaaagaagcttatgtttcatgtcagaatcaaggagctgatttactgagcatcaacagtgctgctgaattaacttaccttaaagaaaaagaaggcattgctaagattttctggattggtttaaatcagctatactctgctagaggctgggaatggtcagaccacaaaccattaaactttctcaactgggatccagacaggcccagtgcacctactataggtggctccagctgtgcaagaatggatgctgagtctggtctgtggcagagcttttcctgtgaagctcaactgccctatgtctgcaggaaaccattaaataatacagtggagttaacagatgtctggacatactcagatacccgctgtgatgcaggctggctgccaaataatggattttgctatctgctggtaaatgaaagtaattcctgggataaggcacatgcgaaatgcaaagccttcagtagtgacctaatcagcattcattctctagcagatgtggaggtggttgtcacaaaactccataatgaggatatcaaagaagaagtgtggataggccttaagaacataaacataccaactttatttcagtggtcagatggtactgaagttactctaacatattgggatgagaatgagccaaatgttccctacaataagacgcccaactgtgtttcctacttaggagagctaggtcagtggaaagtccaatcatgtgaggagaaactaaaatatgtatgcaagagaaagggagaaaaactgaatgacgcaagttctgataagatgtgtcctccagatgagggctggaagagacatggagaaacctgttacaagatttatgaggatgaggtcccttttggaacaaactgcaatctgactatcactagcagatttgagcaagaatacctaaatgatttgatgaaaaagtatgataaatctctaagaaaatacttctggactggcctgagagatgtagattcttgtggagagtataactgggcaactgttggtggaagaaggcgggctgtaaccttttccaactggaattttcttgagccagcttccccgggcggctgcgtggctatgtctactggaaagtctgttggaaagtgggaggtgaaggactgcagaagcttcaaagcactttcaatttgcaagaaaatgagtggaccccttgggcctgaagaagcatcccctaagcctgatgacccctgtcctgaaggctggcagagtttccccgcaagtctttcttgttataaggtattccatgcagaaagaattgtaagaaagaggaactgggaagaagctgaacgattctgccaagcccttggagcacacctttctagcttcagccatgtggatgaaataaaggaatttcttcactttttaacggaccagttcagtggccagcattggctgtggattggtttgaataaaaggagcccagatttacaaggatcctggcaatggagtgatcgtacaccagtgtctactattatcatgccaaatgagtttcagcaggattatgacatcagagactgtgctgctgtcaaggtatttcataggccatggcgaagaggctggcatttctatgatgatagagaatttatttatttgaggccttttgcttgtgatacaaaacttgaatgggtgtgccaaattccaaaaggccgtactccaaaaacaccagactggtacaatccagaccgtgctggaattcatggacctccacttataattgaaggaagtgaatattggtttgttgctgatcttcacctaaactatgaagaagccgtcctgtactgtgccagcaatcacagctttcttgcgactataacatcttttgtgggactaaaagccatcaaaaacaaaatagcaaatatatctggtgatggacagaagtggtggataagaattagcgagtggccaatagatgatcattttacatactcacgatatccatggcaccgctttcctgtgacatttggagaggaatgcttgtacatgtctgccaagacttggcttatcgacttaggtaaaccaacagactgtagtaccaagttgcccttcatctgtgaaaaatataatgtttcttcgttagagaaatacagcccagattctgcagctaaagtgcaatgttctgagcaatggattccttttcagaataagtgttttctaaagatcaaacccgtgtctctcacattttctcaagcaagcgatacctgtcactcctatggtggcacccttccttcagtgttgagccagattgaacaagactttattacatccttgcttccggatatggaagctactttatggattggtttgcgctggactgcctatgaaaagataaacaaatggacagataacagagagctgacgtacagtaactttcacccattattggttagtgggaggctgagaataccagaaaatttttttgaggaagagtctcgctaccactgtgccctaatactcaacctccaaaaatcaccgtttactgggacgtggaattttacatcctgcagtgaacgccactttgtgtctctctgtcagaaatattcagaagttaaaagcagacagacgttgcagaatgcttcagaaactgtaaagtatctaaataatctgtacaaaataatcccaaagactctgacttggcacagtgctaaaagggagtgtctgaaaagtaacatgcagctggtgagcatcacggacccttaccagcaggcattcctcagtgtgcaggcgctccttcacaactcttccttatggatcggactcttcagtcaagatgatgaactcaactttggttggtcagatgggaaacgtcttcattttagtcgctgggctgaaactaatgggcaactcgaagactgtgtagtattagacactgatggattctggaaaacagttgattgcaatgacaatcaaccaggtgctatttgctactattcaggaaatgagactgaaaaagaggtcaaaccagttgacagtgttaaatgtccatctcctgttctaaatactctgtggataccatttcagaactgttgctacaatttcataataacaaagaataggcatatggcaacaacacaggatgaagttcatactaaatgccagaaactgaatccaaaatcacatattctgagtattcgagatgaaaaggagaataactttgttcttgagcaactgctgtacttcaattatatggcttcatgggtcatgttaggaataacttatagaaataattctcttatgtggtttgataagaccccactgtcatatacacattggagagcaggaagaccaactataaaaaatgagaagtttttggctggtttaagtactgacggcttctgggatattcaaacctttaaagttattgaagaagcagtttattttcaccagcacagcattcttgcttgtaaaattgaaatggttgactacaaagaagaacataatactacactgccacagtttatgccatatgaagatggtatttacagtgttattcaaaaaaaggtaacatggtatgaagcattaaacatgtgttctcaaagtggaggtcacttggcaagcgttcacaaccaaaatggccagctctttctggaagatattgtaaaacgtgatggatttccactatgggttgggctctcaagtcatgatggaagtgaatcaagttttgaatggtctgatggtagtacatttgactatatcccatggaaaggccaaacatctcctggaaattgtgttctcttggatccaaaaggaacttggaaacatgaaaaatgcaactctgttaaggatggtgctatttgttataaacctacaaaatctaaaaagctgtcccgtcttacatattcatcaagatgtccagcagcaaaagagaatgggtcacggtggatccagtacaagggtcactgttacaagtctgatcaggcattgcacagtttttcagaggccaaaaaattgtgttcaaaacatgatcactctgcaactatcgtttccataaaagatgaagatgagaataaatttgtgagcagactgatgagggaaaataataacattaccatgagagtttggcttggattatctcaacattctgttgactgtccttcatctacttggattcagttccaagacagttgttacatttttctccaagaagccatcaaagtagaaagcatagaggatgtcagaaatcagtgtactgaccatggagcggacatgataagcatacataatgaagaagaaaatgcttttatactggatactttgaaaaagcaatggaaaggcccagatgatatcctactaggcatgttttatgacacagatgatgcgagtttcaagtggtttgataattcaaatatgacatttgataagtggacagaccaagatgatgatgaggatttagttgacacctgtgcttttctgcacatcaagacaggtgaatggaaaaaaggaaattgtgaagtttcttctgtggaaggaacactatgcaaaacagctatcccatacaaaaggaaatatttatcagataaccacattttaatatcagcattggtgattgctagcacggtaattttgacagttttgggagcaatcatttggttcctgtacaaaaaacattctgattctcgtttcaccacagttttttcaaccgcaccccaatcaccttataatgaagactgtgttttggtagttggagaagaaaatgaatatcctgttcaatttgactaa

SEQ ID NO: 21 - RNA, 5713 nt, Homo sapiens
  source 1..5713: mol_type = other RNA
gataaggcacatgcgaaatgcaaagccttcagtagtgacctaatcagcattcattctctagcagatgtggaggtggttgtcacaaaactccataatgaggatatcaaagaagaagtgtggataggccttaagaacataaacataccaactttatttcagtggtcagatggtactgaagttactctaacatattgggatgagaatgagccaaatgttccctacaataagacgcccaactgtgtttcctacttaggagagctaggtcagtggaaagtccaatcatgtgaggagaaactaaaatatgtatgcaagagaaagggagaaaaactgaatgacgcaagttctgataagatgtgtcctccagatgagggctggaagagacatggagaaacctgttacaagatttatgaggatgaggtcccttttggaacaaactgcaatctgactatcactagcagatttgagcaagaatacctaaatgatttgatgaaaaagtatgataaatctctaagaaaatacttctggactggcctgagagatgtagattcttgtggagagtataactgggcaactgttggtggaagaaggcgggctgtaaccttttccaactggaattttcttgagccagcttccccgggcggctgcgtggctatgtctactggaaagtctgttggaaagtgggaggtgaaggactgcagaagcttcaaagcactttcaatttgcaagaaaatgagtggaccccttgggcctgaagaagcatcccctaagcctgatgacccctgtcctgaaggctggcagagtttccccgcaagtctttcttgttataaggtattccatgcagaaagaattgtaagaaagaggaactgggaagaagctgaacgattctgccaagcccttggagcacacctttctagcttcagccatgtggatgaaataaaggaatttcttcactttttaacggaccagttcagtggccagcattggctgtggattggtttgaataaaaggagcccagatttacaaggatcctggcaatggagtgatcgtacaccagtgtctactattatcatgccaaatgagtttcagcaggattatgacatcagagactgtgctgctgtcaaggtatttcataggccatggcgaagaggctggcatttctatgatgatagagaatttatttatttgaggccttttgcttgtgatacaaaacttgaatgggtgtgccaaattccaaaaggccgtactccaaaaacaccagactggtacaatccagagcgtgctggaattcatggacctccacttataattgaaggaagtgaatattggtttgttgctgatcttcacctaaactatgaagaagccgtcctgtactgtgccagcaatcacagctttcttgcaactataacatcttttgtgggactaaaagccatcaaaaacaaaatagcaaatatatctggtgatggacagaagtggtggataagaattagcgagtggccaatagatgatcattttacatactcacgatatccatggcaccgctttcctgtgacatttggagaggaatgcttgtacatgtctgccaagacttggcttatcgacttaggtaaaccaacagactgtagtaccaagttgcccttcatctgtgaaaaatataatgtttcttcgttagagaaatacagcccagattctgcagctaaagtgcaatgttctgagcaatggattccttttcagaataagtgttttctaaagatcaaacccgtgtctctcacattttctcaagcaagcgatacctgtcactcctatggtggcacccttccttcagtgttgagccagattgaacaagactttattacatccttgcttccggatatggaagctactttatggattggtttgcgctggactgcctatgaaaagataaacaaatggacagataacagagagctgacgtacagtaactttcacccattattggttagtgggaggctgagaataccagaaaatttttttgaggaagagtctcgctaccactgtgccctaatactcaacctccaaaaatcaccgtttactgggacgtggaattttacatcctgcagtgaacgccactttgtgtctctctgtcagaaatattcagaagttaaaagcagacagacgttgcagaatgcttcagaaactgtaaagtatctaaataatctgtacaaaataatcccaaagactctgacttggcacagtgctaaaagggagtgtctgaaaagtaacatgcagctggtgagcatcacggacccttaccagcaggcattcctcagtgtgcaggcgctccttcacaactcttccttatggatcggactcttcagtcaagatgatgaactcaactttggttggtcagatgggaaacgtcttcattttagtcgctgggctgaaactaatgggcaactcgaagactgtgtagtattagacactgatggattctggaaaacagttgattgcaatgacaatcaaccaggtgctatttgctactattcaggaaatgagactgaaaaagaggtcaaaccagttgacagtgttaaatgtccatctcctgttctaaatactctgtggataccatttcagaactgttgctacaatttcataataacaaagaataggcatatggcaacaacacaggatgaagttcatactaaatgccagaaactgaatccaaaatcacatattctgagtattcgagatgaaaaggagaataactttgttcttgagcaactgctgtacttcaattatatggcttcatgggtcatgttaggaataacttatagaaataattctcttatgtggtttgataagaccccactgtcatatacacattggagagcaggaagaccaactataaaaaatgagaagtttttggctggtttaagtactgacggcttctgggatattcaaacctttaaagttattgaagaagcagtttattttcaccagcacagcattcttgcttgtaaaattgaaatggttgactacaaagaagaatataatactacactgccacagtttatgccatatgaagatggtatttacagtgttattcaaaaaaaggtaacatggtatgaagcattaaacatgtgttctcaaagtggaggtcacttggcaagcgttcacaaccaaaatggccagctctttctggaagatattgtaaaacgtgatggatttccactatgggttgggctctcaagtcatgatggaagtgaatcaagttttgaatggtctgatggtagtacatttgactatatcccatggaaaggccaaacatctcctggaaattgtgttctcttggatccaaaaggaacttggaaacatgaaaaatgcaactctgttaaggatggtgctatttgttataaacctacaaaatctaaaaagctgtcccgtcttacatattcatcaagatgtccagcagcaaaagagaatgggtcacggtggatccagtacaagggtcactgttacaagtctgatcaggcattgcacagtttttcagaggccaaaaaattgtgttcaaaacatgatcactctgcaactatcgtttccataaaagatgaagatgagaataaatttgtgagcagactgatgagggaaaataataacattaccatgagagtttggcttggattatctcaacattctgttgaccagtcttggagttggttagatggatcagaagtgacatttgtcaaatgggaaaataaaagtaagagtggtgttggaagatgtagcatgttgatagcttcaaatgaaacttggaaaaaagttgaatgtgaacatggttttggaagagttgtctgcaaagtgcctctgggccctgattacacagcaatagctatcatagttgccacactaagtatcttagttctcatgggcggactgatttggttcctcttccaaaggcaccgtttgcacctggcgggtttctcatcagttcgatatgcacaaggagtgaatgaagatgagattatgcttccttctttccatgactaaattcttctaaaagttttctaatttgcactaatgtgttatgagaaattagtcacttaaaatgtcccagtgtcagtatttactctgctccaaagtagaactcttaaatactttttcagttgtttagatcttaggcatgtgctggtatccacagttaattccctgctaaatgccatgtttatcaccctaattaatagaatggaggggactccaaagctggaactgaagtccaaattgtttgtacagtaatatgtttaatgttcattttctctgtatgaatgtgattggtaactaggatatgtatattttaatagaatttttaacaaaacttcttagaaaattaaaataggcatattactaggtgacatgtctactttttaatttttaagagcatccggccaaatgcaaaattagtacctcaaagtaaaaattgaactgtaaactctatcagcattgtttcaaaatagtcatttttagcactggggaaaaataaacaataagacatgcttactttttaatttttatttttttgagactgagtctctctctgttgcccaggctggagtacaatggcgtgatctcggctcactgcaaatctccgcctcccaggttcaagcgattctcctgcctcagcctcctgagtagctgggattacaggcaactgccaccatgcccggctaatttttgtatttttagtagagatggggtttcaccatgttggccaggctggtctcgaactcgtgaccgcaggtgatcctcccgcctcggcctcccaaagtgctgggattacaggcatgagccaccgcgcctggcctctgcttactttttatatagcaaaatgattcctcttggcaagatgtttcttatattattccaaagttatttcataccattattatgtaaatatgaagagtttttttctgtttataattgtttataaaacaatgacttttaaagatttagtgcttaacattttcccaagtgtgggaacattatttttagattgagtaggtaccttgtagcagtgtgctttgcattttctgatgtattacatgactgtttcttttgtaaagagaatcaactaggtatttaagactgataattttacaatttatatgcttcacatagcatgtcaacttttgactaagaattttgttttacttttttaacatgtgttaaacagagaaagggtccatgaaggaaagtgtatgagttgcatttgtaaaaatgagactttttcagtggaactctaaaccttgtgatgactactaacaaatgtaaaattatgagtgattaagaaaacattgctttgtggttatcactttaagttttgacacctagattatagtcttagtaatagcatccactggaaaaggtgaaaatgttttattcagcatttaacttacatttgtactttagagtatttttgtataaaatccatagatttattttacatttagagtatttacactatgataaagttgtaaataattttctaagacagtttttatatagtctacagttgtcctgatttcttattgaatttgttagactagttctcttgtcctgtgatctgtgtacaattttagtcactaagactttcctccaagaactaagccaacttgatgtgaaaagcacagctgtatataatggtgatgtcataataaagttgttttatcttttaagtaaaagt

SEQ ID NO: 22 - RNA, 6928 nt, Homo sapiens
  source 1..6928: mol_type = other RNA
ggcgggagcgcgtgcgcccgaggacccggccggaaggcttgcgccagctcaggatgaggacaggctgggcgacccctcgccgcccggcggggctcctcatgctgctcttctggttcttcgatctcgcggagccctctggccgcgcagctaatgaccccttcaccatcgtccatggaaatacgggcaagtgcatcaagccagtgtatggctggatagtagcagacgactgtgatgaaactgaggacaagttatggaagtgggtgtcccagcatcggctctttcatttgcactcccaaaagtgccttggcctcgatattaccaaatcggtaaatgagctgagaatgttcagctgtgactccagtgccatgctgtggtggaaatgtgagcaccactctctgtacggagctgcccggtaccggctggctctgaaggatggacatggcacagcaatctcaaatgcatctgatgtctggaagaaaggaggctcagaggaaagcctttgtgaccagccttatcatgagatctataccagagatgggaactcttatgggagaccttgtgaatttccattcttaattgatgggacctggcatcatgattgcattcttgatgaagatcatagtgggccatggtgtgccaccaccttaaattatgaatatgaccgaaagtggggcatctgcttaaagcctgaaaacggttgtgaagataattgggaaaagaacgagcagtttggaagttgctaccaatttaatactcagacggctctttcttggaaagaagcttatgtttcatgtcagaatcaaggagctgatttactgagcatcaacagtgctgctgaattaacttaccttaaagaaaaagaaggcattgctaagattttctggattggtttaaatcagctatactctgctagaggctgggaatggtcagaccacaaaccattaaactttctcaactgggatccagacaggcccagtgcacctactataggtggctccagctgtgcaagaatggatgctgagtctggtctgtggcagagcttttcctgtgaagctcaactgccctatgtctgcaggaaaccattaaataatacagtggagttaacagatgtctggacatactcagatacccgctgtgatgcaggctggctgccaaataatggattttgctatctgctggtaaatgaaagtaattcctgggataaggcacatgcgaaatgcaaagccttcagtagtgacctaatcagcattcattctctagcagatgtggaggtggttgtcacaaaactccataatgaggatatcaaagaagaagtgtggataggccttaagaacataaacataccaactttatttcagtggtcagatggtactgaagttactctaacatattgggatgagaatgagccaaatgttccctacaataagacgcccaactgtgtttcctacttaggagagctaggtcagtggaaagtccaatcatgtgaggagaaactaaaatatgtatgcaagagaaagggagaaaaactgaatgacgcaagttctgataagatgtgtcctccagatgagggctggaagagacatggagaaacctgttacaagatttatgaggatgaggtcccttttggaacaaactgcaatctgactatcactagcagatttgagcaagaatacctaaatgatttgatgaaaaagtatgataaatctctaagaaaatacttctggactggcctgagagatgtagattcttgtggagagtataactgggcaactgttggtggaagaaggcgggctgtaaccttttccaactggaattttcttgagccagcttccccgggcggctgcgtggctatgtctactggaaagtctgttggaaagtgggaggtgaaggactgcagaagcttcaaagcactttcaatttgcaagaaaatgagtggaccccttgggcctgaagaagcatcccctaagcctgatgacccctgtcctgaaggctggcagagtttccccgcaagtctttcttgttataaggtattccatgcagaaagaattgtaagaaagaggaactgggaagaagctgaacgattctgccaagcccttggagcacacctttctagcttcagccatgtggatgaaataaaggaatttcttcactttttaacggaccagttcagtggccagcattggctgtggattggtttgaataaaaggagcccagatttacaaggatcctggcaatggagtgatcgtacaccagtgtctactattatcatgccaaatgagtttcagcaggattatgacatcagagactgtgctgctgtcaaggtatttcataggccatggcgaagaggctggcatttctatgatgatagagaatttatttatttgaggccttttgcttgtgatacaaaacttgaatgggtgtgccaaattccaaaaggccgtactccaaaaacaccagactggtacaatccagaccgtgctggaattcatggacctccacttataattgaaggaagtgaatattggtttgttgctgatcttcacctaaactatgaagaagccgtcctgtactgtgccagcaatcacagctttcttgcgactataacatcttttgtgggactaaaagccatcaaaaacaaaatagcaaatatatctggtgatggacagaagtggtggataagaattagcgagtggccaatagatgatcattttacatactcacgatatccatggcaccgctttcctgtgacatttggagaggaatgcttgtacatgtctgccaagacttggcttatcgacttaggtaaaccaacagactgtagtaccaagttgcccttcatctgtgaaaaatataatgtttcttcgttagagaaatacagcccagattctgcagctaaagtgcaatgttctgagcaatggattccttttcagaataagtgttttctaaagatcaaacccgtgtctctcacattttctcaagcaagcgatacctgtcactcctatggtggcacccttccttcagtgttgagccagattgaacaagactttattacatccttgcttccggatatggaagctactttatggattggtttgcgctggactgcctatgaaaagataaacaaatggacagataacagagagctgacgtacagtaactttcacccattattggttagtgggaggctgagaataccagaaaatttttttgaggaagagtctcgctaccactgtgccctaatactcaacctccaaaaatcaccgtttactgggacgtggaattttacatcctgcagtgaacgccactttgtgtctctctgtcagaaatattcagaagttaaaagcagacagacgttgcagaatgcttcagaaactgtaaagtatctaaataatctgtacaaaataatcccaaagactctgacttggcacagtgctaaaagggagtgtctgaaaagtaacatgcagctggtgagcatcacggacccttaccagcaggcattcctcagtgtgcaggcgctccttcacaactcttccttatggatcggactcttcagtcaagatgatgaactcaactttggttggtcagatgggaaacgtcttcattttagtcgctgggctgaaactaatgggcaactcgaagactgtgtagtattagacactgatggattctggaaaacagttgattgcaatgacaatcaaccaggtgctatttgctactattcaggaaatgagactgaaaaagaggtcaaaccagttgacagtgttaaatgtccatctcctgttctaaatactctgtggataccatttcagaactgttgctacaatttcataataacaaagaataggcatatggcaacaacacaggatgaagttcatactaaatgccagaaactgaatccaaaatcacatattctgagtattcgagatgaaaaggagaataactttgttcttgagcaactgctgtacttcaattatatggcttcatgggtcatgttaggaataacttatagaaataattctcttatgtggtttgataagaccccactgtcatatacacattggagagcaggaagaccaactataaaaaatgagaagtttttggctggtttaagtactgacggcttctgggatattcaaacctttaaagttattgaagaagcagtttattttcaccagcacagcattcttgcttgtaaaattgaaatggttgactacaaagaagaacataatactacactgccacagtttatgccatatgaagatggtatttacagtgttattcaaaaaaaggtaacatggtatgaagcattaaacatgtgttctcaaagtggaggtcacttggcaagcgttcacaaccaaaatggccagctctttctggaagatattgtaaaacgtgatggatttccactatgggttgggctctcaagtcatgatggaagtgaatcaagttttgaatggtctgatggtagtacatttgactatatcccatggaaaggccaaacatctcctggaaattgtgttctcttggatccaaaaggaacttggaaacatgaaaaatgcaactctgttaaggatggtgctatttgttataaacctacaaaatctaaaaagctgtcccgtcttacatattcatcaagatgtccagcagcaaaagagaatgggtcacggtggatccagtacaagggtcactgttacaagtctgatcaggcattgcacagtttttcagaggccaaaaaattgtgttcaaaacatgatcactctgcaactatcgtttccataaaagatgaagatgagaataaatttgtgagcagactgatgagggaaaataataacattaccatgagagtttggcttggattatctcaacattctgttgaccagtcttggagttggttagatggatcagaagtgacatttgtcaaatgggaaaataaaagtaagagtggtgttggaagatgtagcatgttgatagcttcaaatgaaacttggaaaaaagttgaatgtgaacatggttttggaagagttgtctgcaaagtgcctctgggccctgattacacagcaatagctatcatagttgccacactaagtatcttagttctcatgggcggactgatttggttcctcttccaaaggcaccgtttgcacctggcgggtttctcatcagttcgatatgcacaaggagtgaatgaagatgagattatgcttccttctttccatgactaaattcttctaaaagttttctaatttgcactaatgtggttatggagaaattagtcacttaaaatgtcccagtgtcagtatttactctgctccaaagtagaactcttaaatactttttcagttgtttagatcttaggcatgtgctggtatccacagttaattccctgctaaatgccatgtttatcaccctaattaatagaatggaggggactccaaagctggaactgaagtccaaattgtttgtacagtaatatgtttaatgttcattttctctgtatgaatgtgattggtaactaggatatgtatattttaatagaatttttaacaaaacttcttagaaaattaaaataggcatattactaggtgacatgtctactttttaatttttaagagcatccggccaaatgcaaaattagtacctcaaagtaaaaattgaactgtaaactctatcagcattgtttcaaaatagtcatttttagcactggggaaaaataaacaataagacatgcttactttttaatttttatttttttgagactgagtctctctctgttgcccaggctggagtacaatggcgtgatctcggctcactgcaaatctccgcctcccaggttcaagcgattctcctgcctcagcctcctgagtagctgggattacaggcaactgccaccatgcccggctaatttttgtatttttagtagagatggggtttcaccatgttggccaggctggtctcgaactcgtgaccgcagtgatcctcccgcctcggcctcccaaagtgctgggattacaggcatgagccaccgcgcctggcctctgcttactttttatatagcaaaatgattccccttggcaagatgtttcttatattattccaaagttatttcataccattattatgtaaatatgaagagtttttttctgtttataattgtttataaaacaatgacttttaaagatttagtgcttaacattttcccaagtgtgggaacattatttttagattgagtaggtaccttgtagcagtgtgctttgcattttctgatgtattacatgactgtttcttttgtaaagagaatcaactaggtatttaagactgataattttacaatttatatgcttcacatagcatgtcaacttttgactaagaattttgttttacttttttaacatgtgttaaacagagaaagggtccatgaaggaaagtgtatgagttgcatttgtaaaaatgagactttttcagtggaactctaaaccttgtgatgactactaacaaatgtaaaattatgagtgattaagaaaacattgctttgtggttatcactttaagttttgacacctagattatagtcttagtaatagcatccactggaaaaggtgaaaatgttttattcagcatttaacttacatttgtactttagagtatttttgtataaaatccatagatttattttacatttagagtatttacactatgataaagttgtaaataattttctaagacagtttttatatagtctacagttgtcctgatttcttattgaatttgttagactagttctcttgtcttgtgatctgtgtacaattttagtcactaagactttcctccaagaactaagccaacttgatgtgaaaagcacggctgtatataatggtgatgtcataataaagttgttttatcttttaagtaaaaaaaaaaaaaaaaaaaaa

SEQ ID NO: 23 - RNA, 5169 nt, Homo sapiens
  source 1..5169: mol_type = other RNA
atgaggacaggctgggcgacccctcgccgcccggcggggctcctcatgctgctcttctggttcttcgatctcgcggagccctctggccgcgcagctaatgaccccttcaccatcgtccatggaaatacgggcaagtgcatcaagccagtgtatggctggatagtagcagacgactgtgatgaaactgaggacaagttatggaagtgggtgtcccagcatcggctctttcatttgcactcccaaaagtgccttggcctcgatattaccaaatcggtaaatgagctgagaatgttcagctgtgactccagtgccatgctgtggtggaaatgtgagcaccactctctgtacggagctgcccggtaccggctggctctgaaggatggacatggcacagcaatctcaaatgcatctgatgtctggaagaaaggaggctcagaggaaagcctttgtgaccagccttatcatgagatctataccagagatgggaactcttatgggagaccttgtgaatttccattcttaattgatgggacctggcatcatgattgcattcttgatgaagatcatagtgggccatggtgtgccaccaccttaaattatgaatatgaccgaaagtggggcatctgcttaaagcctgaaaacggttgtgaagataattgggaaaagaacgagcagtttggaagttgctaccaatttaatactcagacggctctttcttggaaagaagcttatgtttcatgtcagaatcaaggagctgatttactgagcatcaacagtgctgctgaattaacttaccttaaagataaagaaggcattgctaagattttctggattggtttaaatcagctatactctgctagaggctgggaatggtcagaccacaaaccattaaactttctcaactgggatccagacaggcccagtgcacctactataggtggctccagctgtgcaagaatggatgctgagtctggtctgtggcagagcttttcctgtgaagctcaactgccctatgtctgcaggaaaccattaaataatacagtggagttaacagatgtctggacatactcagatacccgctgtgatgcaggctggctgccaaataatggattttgctatctgctggtaaatgaaagtaattcctgggataaggcacatgcgaaatgcaaagccttcagtagtgacctaatcagcattcattctctagcagatgtggaggtggttgtcacaaaactccataatgaggatatcaaagaagaagtgtggataggccttaagaacataaacataccaactttatttcagtggtcagatggtactgaagttactctaacatattgggatgagaatgagccaaatgttccctacaataagacgcccaactgtgtttcctacttaggagagctaggtcagtggaaagtccaatcatgtgaggagaaactaaaatatgtatgcaagagaaagggagaaaaactgaatgacgcaagttctgataagatgtgtcctccagatgagggctggaagagacatggagaaacctgttacaagatttatgaggatgaggtcccttttggaacaaactgcaatctgactatcactagcagatttgagcaagaatacctaaatgatttgatgaaaaagtatgataaatctctaagaaaatacttctggactggcctgagagatgtagattcttgtggagagtataactgggcaactgttggtggaagaaggcgggctgtaaccttttccaactggaattttcttgagccagcttccccgggcggctgcgttgctatgtcaactggaaagtctgttggaaagtgggaggtgaaggactgcagaagcttcaaagcactttcaatttgcaagaaaatgagtggaccccttgggcctgaagaagcatcccctaagcctgatgacccctgtcctgaaggctggcagagtttccccgcaagtctttcttgttataaggtatttcatgcagaaagaattgtaagaaagaggaactgggaagaagctgaacgattctgccaagcccttggagcacacctttctagcttcagccatgtggatgaaataaaggaatttcttcactttttaacggaccagttcagtggccagcattggctgtggattggtttgaataaaaggagcccagatttacaaggatcttggcaatggagtgatcgtacaccagtgtctactattatcatgccaaatgagtttcagcaggattatgacatcagagactgtgctgctgtcaaggtatttcataggccatggcgaagaggctggcatttctatgatgatagagaatttatttatttgaggccttttgcttgtgatacaaaacttgaatgggtgtgccaaattccaaaaggccgtactccaaaaacaccagactggtacaatccagagcgtgctggaattcatggacctccacttataattgaaggaagtgaatattggtttgttgctgatcttcacctaaactatgaagaagccgtcctgtactgtgccagcaatcacagctttcttgcaactataacatcttttgtgggactaaaagccatcaaaaacaaaatagcaaatatatctggtgatggacagaagtggtggataagaattagcgagtggccaatagatgatcattttacatactcacgatatccatggcaccgctttcctgtgacatttggagaggaatgcttgtacatgtctgccaagacttggcttatcgacttaggtaaaccaacagactgtagtaccaagttgcccttcatctgtgaaaaatataatgtttcttcgttagagaaatacagcccagattctgcagctaaagtgcaatgttctgagcaatggattccttttcagaataagtgttttctaaagatcaaacccgtgtctctcacattttctcaagcaagcgatacctgtcactcctatggtggcacccttccttcagtgttgagccagattgaacaagactttattacatccttgcttccggatatggaagctactttatggattggtttgcgctggactgcctatgaaaagataaacaaatggacagataacagagagctgacgtacagtaactttcacccattattggttagtgggaggctgagaataccagaaaatttttttgaggaagagtctcgctaccactgtgccctaatactcaacctccaaaaatcaccgtttactgggacgtggaattttacatcctgcagtgaacgccactttgtgtctctctgtcagaaatattcagaagttaaaagcagacagacgttgcagaatgcttcagaaactgtaaagtatctaaataatctgtacaaaataatcccaaagactctgacttggcacagtgctaaaagggagtgtctgaaaagtaacatgcagctggtgagcatcacggacccttaccagcaggcattcctcagtgtgcaggcgctccttcacaactcttccttatggatcggactcttcagtcaagatgatgaactcaactttggttggtcagatgggaaacgtcttcattttagtcgctgggctgaaactaatgggcaactcgaagactgtgtagtattagacactgatggattctggaaaacagttgattgcaatgacaatcaaccaggtgctatttgctactattcaggaaatgagactgaaaaagaggtcaaaccagttgacagtgttaaatgtccatctcctgttctaaatactctgtggataccatttcagaactgttgctacaatttcataataacaaagaataggcatatggcaacaacacaggatgaagttcatactaaatgccagaaactgaatccaaaatcacatattctgagtattcgagatgaaaaggagaataactttgttcttgagcaactgctgtacttcaattatatggcttcatgggtcatgttaggaataacttatagaaataagtctcttatgtggtttgataagaccccactgtcatatacacattggagagcaggaagaccaactataaaaaatgagaagtttttggctggtttaagtactgacggcttctgggatattcaaacctttaaagttattgaagaagcagtttattttcaccagcacagcattcttgcttgtaaaattgaaatggttgactacaaagaagaatataatactacactgccacagtttatgccatatgaagatggtatttacagtgttattcaaaaaaaggtaacatggtatgaagcattaaacatgtgttctcaaagtggaggtcacttggcaagcgttcacaaccaaaatggccagctctttctggaagatattgtaaaacgtgatggatttccactatgggttgggctctcaagtcatgatggaagtgaatcaagttttgaatggtctgatggtagtacatttgactatatcccatggaaaggccaaacatctcctggaaattgtgttctcttggatccaaaaggaacttggaaacatgaaaaatgcaactctgttaaggatggtgctatttgttataaacctacaaaatctaaaaagctgtcccgtcttacatattcatcaagatgtccagcagcaaaagagaatgggtcacggtggatccagtacaagggtcactgttacaagtctgatcaggcattgcacagtttttcagaggccaaaaaattgtgttcaaaacatgatcactctgcaactatcgtttccataaaagatgaagatgagaataaatttgtgagcagactgatgagggaaaataataacattaccatgagagtttggcttggattatctcaacattctgttgaccagtcttggagttggttagatggatcagaagtgacatttgtcaaatgggaaaataaaagtaagagtggtgttggaagatgtagcatgttgatagcttcaaatgaaacttggaaaaaagttgaatgtgaacatggttttggaagagttgtctgcaaagtgcctctgggccctgattacacagcaatagctatcatagttgccacactaagtatcttagttctcatgggcggactgatttggttcctcttccaaaggcaccgtttgcacctggcgggtttctcatcagttcgatatgcacaaggagtgaatgaagatgagattatgcttccttctttccatgactaa

SEQ ID NO: 24 - RNA, 6886 nt, Homo sapiens
  source 1..6886: mol_type = other RNA
ccggccggaaggcttgcgccagctcaggatgaggacaggctgggcgacccctcgccgcccggcggggctcctcatgctgctcttctggttcttcgatctcgcggagccctctggccgcgcagctaatgaccccttcaccatcgtccatggaaatacgggcaagtgcatcaagccagtgtatggctggatagtagcagacgactgtgatgaaactgaggacaagttatggaagtgggtgtcccagcatcggctctttcatttgcactcccaaaagtgccttggcctcgatattaccaaatcggtaaatgagctgagaatgttcagctgtgactccagtgccatgctgtggtggaaatgtgagcaccactctctgtacggagctgcccggtaccggctggctctgaaggatggacatggcacagcaatctcaaatgcatctgatgtctggaagaaaggaggctcagaggaaagcctttgtgaccagccttatcatgagatctataccagagatgggaactcttatgggagaccttgtgaatttccattcttaattgatgggacctggcatcatgattgcattcttgatgaagatcatagtgggccatggtgtgccaccaccttaaattatgaatatgaccgaaagtggggcatctgcttaaagcctgaaaacggttgtgaagataattgggaaaagaacgagcagtttggaagttgctaccaatttaatactcagacggctctttcttggaaagaagcttatgtttcatgtcagaatcaaggagctgatttactgagcatcaacagtgctgctgaattaacttaccttaaagaaaaagaaggcattgctaagattttctggattggtttaaatcagctatactctgctagaggctgggaatggtcagaccacaaaccattaaactttctcaactgggatccagacaggcccagtgcacctactataggtggctccagctgtgcaagaatggatgctgagtctggtctgtggcagagcttttcctgtgaagctcaactgccctatgtctgcaggaaaccattaaataatacagtggagttaacagatgtctggacatactcagatacccgctgtgatgcaggctggctgccaaataatggattttgctatctgctggtaaatgaaagtaattcctgggataaggcacatgcgaaatgcaaagccttcagtagtgacctaatcagcattcattctctagcagatgtggaggtggttgtcacaaaactccataatgaggatatcaaagaagaagtgtggataggccttaagaacataaacataccaactttatttcagtggtcagatggtactgaagttactctaacatattgggatgagaatgagccaaatgttccctacaataagacgcccaactgtgtttcctacttaggagagctaggtcagtggaaagtccaatcatgtgaggagaaactaaaatatgtatgcaagagaaagggagaaaaactgaatgacgcaagttctgataagatgtgtcctccagatgagggctggaagagacatggagaaacctgttacaagatttatgaggatgaggtcccttttggaacaaactgcaatctgactatcactagcagatttgagcaagaatacctaaatgatttgatgaaaaagtatgataaatctctaagaaaatacttctggactggcctgagagatgtagattcttgtggagagtataactgggcaactgttggtggaagaaggcgggctgtaaccttttccaactggaattttcttgagccagcttccccgggcggctgcgtggctatgtctactggaaagtctgttggaaagtgggaggtgaaggactgcagaagcttcaaagcactttcaatttgcaagaaaatgagtggaccccttgggcctgaagaagcatcccctaagcctgatgacccctgtcctgaaggctggcagagtttccccgcaagtctttcttgttataaggtattccatgcagaaagaattgtaagaaagaggaactgggaagaagctgaacgattctgccaagcccttggagcacacctttctagcttcagccatgtggatgaaataaaggaatttcttcactttttaacggaccagttcagtggccagcattggctgtggattggtttgaataaaaggagcccagatttacaaggatcctggcaatggagtgatcgtacaccagtgtctactattatcatgccaaatgagtttcagcaggattatgacatcagagactgtgctgctgtcaaggtatttcataggccatggcgaagaggctggcatttctatgatgatagagaatttatttatttgaggccttttgcttgtgatacaaaacttgaatgggtgtgccaaattccaaaaggccgtactccaaaaacaccagactggtacaatccagaccgtgctggaattcatggacctccacttataattgaaggaagtgaatattggtttgttgctgatcttcacctaaactatgaagaagccgtcctgtactgtgccagcaatcacagctttcttgcaactataacatcttttgtgggactaaaagccatcaaaaacaaaatagcaaatatatctggtgatggacagaagtggtggataagaattagcgagtggccaatagatgatcattttacatactcacgatatccatggcaccgctttcctgtgacatttggagaggaatgcttgtacatgtctgccaagacttggcttatcgacttaggtaaaccaacagactgtagtaccaagttgcccttcatctgtgaaaaatataatgtttcttcgttagagaaatacagcccagattctgcagctaaagtgcaatgttctgagcaatggattccttttcagaataagtgttttctaaagatcaaacccgtgtctctcacattttctcaagcaagcgatacctgtcactcctatggtggcacccttccttcagtgttgagccagattgaacaagactttattacatccttgcttccggatatggaagctactttatggattggtttgcgctggactgcctatgaaaagataaacaaatggacagataacagagagctgacgtacagtaactttcacccattattggttagtgggaggctgagaataccagaaaatttttttgaggaagagtctcgctaccactgtgccctaatactcaacctccaaaaatcaccgtttactgggacgtggaattttacatcctgcagtgaacgccactttgtgtctctctgtcagaaatattcagaagttaaaagcagacagacgttgcagaatgcttcagaaactgtaaagtatctaaataatctgtacaaaataatcccaaagactctgacttggcacagtgctaaaagggagtgtctgaaaagtaacatgcagctggtgagcatcacggacccttaccagcaggcattcctcagtgtgcaggcgctccttcacaactcttccttatggatcggactcttcagtcaagatgatgaactcaactttggttggtcagatgggaaacgtcttcattttagtcgctgggctgaaactaatgggcaactcgaagactgtgtagtattagacactgatggattctggaaaacagttgattgcaatgacaatcaaccaggtgctatttgctactattcaggaaatgagactgaaaaagaggtcaaaccagttgacagtgttaaatgtccatctcctgttctaaatactctgtggataccatttcagaactgttgctacaatttcataataacaaagaataggcatatggcaacaacacaggatgaagttcatactaaatgccagaaactgaatccaaaatcacatattctgagtattcgagatgaaaaggagaataactttgttcttgagcaactgctgtacttcaattatatggcttcatgggtcatgttaggaataacttatagaaataagtctcttatgtggtttgataagaccccactgtcatatacacattggagagcaggaagaccaactataaaaaatgagaagtttttggctggtttaagtactgacggcttctgggatattcaaacctttaaagttattgaagaagcagtttattttcaccagcacagcattcttgcttgtaaaattgaaatggttgactacaaagaagaatataatactacactgccacagtttatgccatatgaagatggtatttacagtgttattcaaaaaaaggtaacatggtatgaagcattaaacatgtgttctcaaagtggaggtcacttggcaagcgttcacaaccaaaatggccagctctttctggaagatattgtaaaacgtgatggatttccactatgggttgggctctcaagtcatgatggaagtgaatcaagttttgaatggtctgatggtagtacatttgactatatcccatggaaaggccaaacatctcctggaaattgtgttctcttggatccaaaaggaacttggaaacatgaaaaatgcaactctgttaaggatggtgctatttgttataaacctacaaaatctaaaaagctgtcccgtcttacatattcatcaagatgtccagcagcaaaagagaatgggtcacggtggatccagtacaagggtcactgttacaagtctgatcaggcattgcacagtttttcagaggccaaaaaattgtgttcaaaacatgatcactctgcaactatcgtttccataaaagatgaagatgagaataaatttgtgagcagactgatgagggaaaataataacattaccatgagagtttggcttggattatctcaacattctgttgaccagtcttggagttggttagatggatcagaagtgacatttgtcaaatgggaaaataaaagtaagagtggtgttggaagatgtagcatgttgatagcttcaaatgaaacttggaaaaaagttgaatgtgaacatggttttggaagagttgtctgcaaagtgcctctgggccctgattacacagcaatagctatcatagttgccacactaagtatcttagttctcatgggcggactgatttggttcctcttccaaaggcaccgtttgcacctggcgggtttctcatcagttcgatatgcacaaggagtgaatgaagatgagattatgcttccttctttccatgactaaattcttctaaaagttttctaatttgcactaatgtgttatgagaaattagtcacttaaaatgtcccagtgtcagtatttactctgctccaaagtagaactcttaaatactttttcagttgtttagatcttaggcatgtgctggtatccacagttaattccctgctaaatgccatgtttatcaccctaattaatagaatggaggggactccaaagctggaactgaagtccaaattgtttgtacagtaatatgtttaatgttcattttctctgtatgaatgtgattggtaactaggatatgtatattttaatagaatttttaacaaaacttcttagaaaattaaaataggcatattactaggtgacatgtctactttttaatttttaagagcatccggccaaatgcaaaattagtacctcaaagtaaaaattgaactgtaaactctatcagcattgtttcaaaatagtcatttttagcactggggaaaaataaacaataagacatgcttactttttaatttttatttttttgagactgagtctctctctgttgcccaggctggagtacaatggcgtgatctcggctcactgcaaatctccgcctcccaggttcaagcgattctcctgcctcagcctcctgagtagctgggattacaggcaactgccaccatgcccggctaatttttgtatttttagtagagatggggtttcaccatgttggccaggctggtctcgaactcgtgaccgcaggtgatcctcccgcctcggcctcccaaagtgctgggattacaggcatgagccaccgcgcctggcctctgcttactttttatatagcaaaatgattcctcttggcaagatgtttcttatattattccaaagttatttcataccattattatgtaaatatgaagagtttttttctgtttataattgtttataaaacaatgacttttaaagatttagtgcttaacattttcccaagtgtgggaacattatttttagattgagtaggtaccttgtagcagtgtgctttgcattttctgatgtattacatgactgtttcttttgtaaagagaatcaactaggtatttaagactgataattttacaatttatatgcttcacatagcatgtcaacttttgactaagaattttgttttacttttttaacatgtgttaaacagagaaagggtccatgaaggaaagtgtatgagttgcatttgtaaaaatgagactttttcagtggaactctaaaccttgtgatgactactaacaaatgtaaaattatgagtgattaagaaaacattgctttgtggttatcactttaagttttgacacctagattatagtcttagtaatagcatccactggaaaaggtgaaaatgttttattcggcatttaacttacatttgtactttatttttgtataaaatccatagatttattttacatttagagtatttacactatgataaagttgtaaataattttctaagacagtttttatatagtctacagttgtcctgatttcttattgaatttgttagactagttctcttgtcctgtgatctgtgtacaattttagtcactaagactttcctccaagaactaagccaacttgatgtgaaaagcacagctgtatataatggtgatgtcataataaagttgttttatcttttaagtaaaagtaaaa

SEQ ID NO: 25 - DNA, 6932 bp, Homo sapiens
  source 1..6932: mol_type = genomic DNA
aggccgcgctcagcaggcggggcgggagccgcgtgcgcccgaggacccggccggaaggcttgcgccagctcaggatgaggacaggctgggcgacccctcgccgcccggcggggctcctcatgctgctcttctggttcttcgatctcgcggagccctctggccgcgcagctaatgaccccttcaccatcgtccatggaaatacgggcaagtgcatcaagccagtgtatggctggatagtagcagacgactgtgatgaaactgaggacaagttatggaagtgggtgtcccagcatcggctctttcatttgcactcccaaaagtgccttggcctcgatattaccaaatcggtaaatgagctgagaatgttcagctgtgactccagtgccatgctgtggtggaaatgtgagcaccactctctgtacggagctgcccggtaccggctggctctgaaggatggacatggcacagcaatctcaaatgcatctgatgtctggaagaaaggaggctcagaggaaagcctttgtgaccagccttatcatgagatctataccagagatgggaactcttatgggagaccttgtgaatttccattcttaattgatgggacctggcatcatgattgcattcttgatgaagatcatagtgggccatggtgtgccaccaccttaaattatgaatatgaccgaaagtggggcatctgcttaaagcctgaaaacggttgtgaagataattgggaaaagaacgagcagtttggaagttgctaccaatttaatactcagacggctctttcttggaaagaagcttatgtttcatgtcagaatcaaggagctgatttactgagcatcaacagtgctgctgaattaacttaccttaaagaaaaagaaggcattgctaagattttctggattggtttaaatcagctatactctgctagaggctgggaatggtcagaccacaaaccattaaactttctcaactgggatccagacaggcccagtgcacctactataggtggctccagctgtgcaagaatggatgctgagtctggtctgtggcagagcttttcctgtgaagctcaactgccctatgtctgcaggaaaccattaaataatacagtggagttaacagatgtctggacatactcagatacccgctgtgatgcaggctggctgccaaataatggattttgctatctgctggtaaatgaaagtaattcctgggataaggcacatgcgaaatgcaaagccttcagtagtgacctaatcagcattcattctctagcagatgtggaggtggttgtcacaaaactccataatgaggatatcaaagaagaagtgtggataggccttaagaacataaacataccaactttatttcagtggtcagatggtactgaagttactctaacatattgggatgagaatgagccaaatgttccctacaataagacgcccaactgtgtttcctacttaggagagctaggtcagtggaaagtccaatcatgtgaggagaaactaaaatatgtatgcaagagaaagggagaaaaactgaatgacgcaagttctgataagatgtgtcctccagatgagggctggaagagacatggagaaacctgttacaagatttatgaggatgaggtcccttttggaacaaactgcaatctgactatcactagcagatttgagcaagaatacctaaatgatttgatgaaaaagtatgataaatctctaagaaaatacttctggactggcctgagagatgtagattcttgtggagagtataactgggcaactgttggtggaagaaggcgggctgtaaccttttccaactggaattttcttgagccagcttccccgggcggctgcgtggctatgtctactggaaagtctgttggaaagtgggaggtgaaggactgcagaagcttcaaagcactttcaatttgcaagaaaatgagtggaccccttgggcctgaagaagcatcccctaagcctgatgacccctgtcctgaaggctggcagagtttccccgcaagtctttcttgttataaggtattccatgcagaaagaattgtaagaaagaggaactgggaagaagctgaacgattctgccaagcccttggagcacacctttctagcttcagccatgtggatgaaataaaggaatttcttcactttttaacggaccagttcagtggccagcattggctgtggattggtttgaataaaaggagcccagatttacaaggatcctggcaatggagtgatcgtacaccagtgtctactattatcatgccaaatgagtttcagcaggattatgacatcagagactgtgctgctgtcaaggtatttcataggccatggcgaagaggctggcatttctatgatgatagagaatttatttatttgaggccttttgcttgtgatacaaaacttgaatgggtgtgccaaattccaaaaggccgtactccaaaaacaccagactggtacaatccagaccgtgctggaattcatggacctccacttataattgaaggaagtgaatattggtttgttgctgatcttcacctaaactatgaagaagccgtcctgtactgtgccagcaatcacagctttcttgcaactataacatcttttgtgggactaaaagccatcaaaaacaaaatagcaaatatatctggtgatggacagaagtggtggataagaattagcgagtggccaatagatgatcattttacatactcacgatatccatggcaccgctttcctgtgacatttggagaggaatgcttgtacatgtctgccaagacttggcttatcgacttaggtaaaccaacagactgtagtaccaagttgcccttcatctgtgaaaaatataatgtttcttcgttagagaaatacagcccagattctgcagctaaagtgcaatgttctgagcaatggattccttttcagaataagtgttttctaaagatcaaacccgtgtctctcacattttctcaagcaagcgatacctgtcactcctatggtggcacccttccttcagtgttgagccagattgaacaagactttattacatccttgcttccggatatggaagctactttatggattggtttgcgctggactgcctatgaaaagataaacaaatggacagataacagagagctgacgtacagtaactttcacccattattggttagtgggaggctgagaataccagaaaatttttttgaggaagagtctcgctaccactgtgccctaatactcaacctccaaaaatcaccgtttactgggacgtggaattttacatcctgcagtgaacgccactttgtgtctctctgtcagaaatattcagaagttaaaagcagacagacgttgcagaatgcttcagaaactgtaaagtatctaaataatctgtacaaaataatcccaaagactctgacttggcacagtgctaaaagggagtgtctgaaaagtaacatgcagctggtgagcatcacggacccttaccagcaggcattcctcagtgtgcaggcgctccttcacaactcttccttatggatcggactcttcagtcaagatgatgaactcaactttggttggtcagatgggaaacgtcttcattttagtcgctgggctgaaactaatgggcaactcgaagactgtgtagtattagacactgatggattctggaaaacagttgattgcaatgacaatcaaccaggtgctatttgctactattcaggaaatgagactgaaaaagaggtcaaaccagttgacagtgttaaatgtccatctcctgttctaaatactccgtggataccatttcagaactgttgctacaatttcataataacaaagaataggcatatggcaacaacacaggatgaagttcatactaaatgccagaaactgaatccaaaatcacatattctgagtattcgagatgaaaaggagaataactttgttcttgagcaactgctgtacttcaattatatggcttcatgggtcatgttaggaataacttatagaaataagtctcttatgtggtttgataagaccccactgtcatatacacattggagagcaggaagaccaactataaaaaatgagaagtttttggctggtttaagtactgacggcttctgggatattcaaacctttaaagttattgaagaagcagtttattttcaccagcacagcattcttgcttgtaaaattgaaatggttgactacaaagaagaatataatactacactgccacagtttatgccatatgaagatggtatttacagtgttattcaaaaaaaggtaacatggtatgaagcattaaacatgtgttctcaaagtggaggtcacttggcaagcgttcacaaccaaaatggccagctctttctggaagatattgtaaaacgtgatggatttccactatgggttgggctctcaagtcatgatggaagtgaatcaagttttgaatggtctgatggtagtacatttgactatatcccatggaaaggccaaacatctcctggaaattgtgttctcttggatccaaaaggaacttggaaacatgaaaaatgcaactctgttaaggatggtgctatttgttataaacctacaaaatctaaaaagctgtcccgtcttacatattcatcaagatgtccagcagcaaaagagaatgggtcacggtggatccagtacaagggtcactgttacaagtctgatcaggcattgcacagtttttcagaggccaaaaaattgtgttcaaaacatgatcactctgcaactatcgtttccataaaagatgaagatgagaataaatttgtgagcagactgatgagggaaaataataacattaccatgagagtttggcttggattatctcaacattctgttgaccagtcttggagttggttagatggatcagaagtgacatttgtcaaatgggaaaataaaagtaagagtggtgttggaagatgtagcatgttgatagcttcaaatgaaacttggaaaaaagttgaatgtgaacatggttttggaagagttgtctgcaaagtgcctctgggccctgattacacagcaatagctatcatagttgccacactaagtatcttagttctcatgggcggactgatttggttcctcttccaaaggcaccgtttgcacctggcgggtttctcatcagttcgatatgcacaaggagtgaatgaagatgagattatgcttccttctttccatgactaaattcttctaaaagttttctaatttgcactaatgtgttatgagaaattagtcacttaaaatgtcccagtgtcagtatttactctgctccaaagtagaactcttaaatactttttcagttgtttagatcttaggcatgtgctggtatccacagttaattccctgctaaatgccatgtttatcaccctaattaatagaatggaggggactccaaagctggaactgaagtccaaattgtttgtacagtaatatgtttaatgttcattttctctgtatgaatgtgattggtaactaggatatgtatattttaatagaatttttaacaaaacttcttagaaaattaaaataggcatattactaggtgacatgtctactttttaatttttaagagcatccggccaaatgcaaaattagtacctcaaagtaaaaattgaactgtaaactctatcagcattgtttcaaaatagtcatttttagcactggggaaaaataaacaataagacatgcttactttttaatttttatttttttgagactgagtctctctctgttgcccaggctggagtacaatggcgtgatctcggctcactgcaaatctccgcctcccaggttcaagcgattctcctgcctcagcctcctgagtagctgggattacaggcaactgccaccatgcccggctaatttttgtatttttagtagagatggggtttcaccatgttggccaggctggtctcgaactcgtgaccgcaggtgatcctcccgcctcggcctcccaaagtgctgggattacaggcatgagccaccgcgcctggcctctgcttactttttatatagcaaaatgattcctcttggcaagatgtttcttatattattccaaagttatttcataccattattatgtaaatatgaagagtttttttctgtttataattgtttataaaacaatgacttttaaagatttagtgcttaacattttcccaagtgtgggaacattatttttagattgagtaggtaccttgtagcagtgtgctttgcattttctgatgtattacatgactgtttcttttgtaaagagaatcaactaggtatttaagactgataattttacaatttatatgcttcacatagcatgtcaacttttgactaagaattttgttttacttttttaacatgtgttaaacagagaaagggtccatgaaggaaagtgtatgagttgcatttgtaaaaatgagactttttcagtggaactctaaaccttgtgatgactactaacaaatgtaaaattatgagtgattaagaaaacattgctttgtggttatcactttaagttttgacacctagattatagtcttagtaatagcatccactggaaaaggtgaaaatgttttattcggcatttaacttacatttgtactttatttttgtataaaatccatagatttattttacatttagagtatttacactatgataaagttgtaaataattttctaagacagtttttatatagtctacagttgtcctgatttcttattgaatttgttagactagttctcttgtcctgtgatctgtgtacaattttagtcactaagactttcctccaagaactaagccaacttgatgtgaaaagcacagctgtatataatggtgatgtcataataaagttgttttatcttttaagtaaaagtaaaa

SEQ ID NO: 26 - DNA, 5650 bp, Homo sapiens
  source 1..5650: mol_type = genomic DNA
ccggccggaaggcttgcgccagctcaggatgaggacaggctgggcgacccctcgccgcccggcggggctcctcatgctgctcttctggttcttcgatctcgcggagccctctggccgcgcagctaatgaccccttcaccatcgtccatggaaatacgggcaagtgcatcaagccagtgtatggctggatagtagcagacgactgtgatgaaactgaggacaagttatggaagtgggtgtcccagcatcggctctttcatttgcactcccaaaagtgccttggcctcgatattaccaaatcggtaaatgagctgagaatgttcagctgtgactccagtgccatgctgtggtggaaatgtgagcaccactctctgtacggagctgcccggtaccggctggctctgaaggatggacatggcacagcaatctcaaatgcatctgatgtctggaagaaaggaggctcagaggaaagcctttgtgaccagccttatcatgagatctataccagagatgggaactcttatgggagaccttgtgaatttccattcttaattgatgggacctggcatcatgattgcattcttgatgaagatcatagtgggccatggtgtgccaccaccttaaattatgaatatgaccgaaagtggggcatctgcttaaagcctgaaaacggttgtgaagataattgggaaaagaacgagcagtttggaagttgctaccaatttaatactcagacggctctttcttggaaagaagcttatgtttcatgtcagaatcaaggagctgatttactgagcatcaacagtgctgctgaattaacttaccttaaagaaaaagaaggcattgctaagattttctggattggtttaaatcagctatactctgctagaggctgggaatggtcagaccacaaaccattaaactttctcaactgggatccagacaggcccagtgcacctactataggtggctccagctgtgcaagaatggatgctgagtctggtctgtggcagagcttttcctgtgaagctcaactgccctatgtctgcaggaaaccattaaataatacagtggagttaacagatgtctggacatactcagatacccgctgtgatgcaggctggctgccaaataatggattttgctatctgctggtaaatgaaagtaattcctgggataaggcacatgcgaaatgcaaagccttcagtagtgacctaatcagcattcattctctagcagatgtggaggtggttgtcacaaaactccataatgaggatatcaaagaagaagtgtggataggccttaagaacataaacataccaactttatttcagtggtcagatggtactgaagttactctaacatattgggatgagaatgagccaaatgttccctacaataagacgcccaactgtgtttcctacttaggagagctaggtcagtggaaagtccaatcatgtgaggagaaactaaaatatgtatgcaagagaaagggagaaaaactgaatgacgcaagttctgataagatgtgtcctccagatgagggctggaagagacatggagaaacctgttacaagatttatgaggatgaggtcccttttggaacaaactgcaatctgactatcactagcagatttgagcaagaatacctaaatgatttgatgaaaaagtatgataaatctctaagaaaatacttctggactggcctgagagatgtagattcttgtggagagtataactgggcaactgttggtggaagaaggcgggctgtaaccttttccaactggaattttcttgagccagcttccccgggcggctgcgtggctatgtctactggaaagtctgttggaaagtgggaggtgaaggactgcagaagcttcaaagcactttcaatttgcaagaaaatgagtggaccccttgggcctgaagaagcatcccctaagcctgatgacccctgtcctgaaggctggcagagtttccccgcaagtctttcttgttataaggtattccatgcagaaagaattgtaagaaagaggaactgggaagaagctgaacgattctgccaagcccttggagcacacctttctagcttcagccatgtggatgaaataaaggaatttcttcactttttaacggaccagttcagtggccagcattggctgtggattggtttgaataaaaggagcccagatttacaaggatcctggcaatggagtgatcgtacaccagtgtctactattatcatgccaaatgagtttcagcaggattatgacatcagagactgtgctgctgtcaaggtatttcataggccatggcgaagaggctggcatttctatgatgatagagaatttatttatttgaggccttttgcttgtgatacaaaacttgaatgggtgtgccaaattccaaaaggccgtactccaaaaacaccagactggtacaatccagaccgtgctggaattcatggacctccacttataattgaaggaagtgaatattggtttgttgctgatcttcacctaaactatgaagaagccgtcctgtactgtgccagcaatcacagctttcttgcaactataacatcttttgtgggactaaaagccatcaaaaacaaaatagcaaatatatctggtgatggacagaagtggtggataagaattagcgagtggccaatagatgatcattttacatactcacgatatccatggcaccgctttcctgtgacatttggagaggaatgcttgtacatgtctgccaagacttggcttatcgacttaggtaaaccaacagactgtagtaccaagttgcccttcatctgtgaaaaatataatgtttcttcgttagagaaatacagcccagattctgcagctaaagtgcaatgttctgagcaatggattccttttcagaataagtgttttctaaagatcaaacccgtgtctctcacattttctcaagcaagcgatacctgtcactcctatggtggcacccttccttcagtgttgagccagattgaacaagactttattacatccttgcttccggatatggaagctactttatggattggtttgcgctggactgcctatgaaaagataaacaaatggacagataacagagagctgacgtacagtaactttcacccattattggttagtgggaggctgagaataccagaaaatttttttgaggaagagtctcgctaccactgtgccctaatactcaacctccaaaaatcaccgtttactgggacgtggaattttacatcctgcagtgaacgccactttgtgtctctctgtcagaaatattcagaagttaaaagcagacagacgttgcagaatgcttcagaaactgtaaagtatctaaataatctgtacaaaataatcccaaagactctgacttggcacagtgctaaaagggagtgtctgaaaagtaacatgcagctggtgagcatcacggacccttaccagcaggcattcctcagtgtgcaggcgctccttcacaactcttccttatggatcggactcttcagtcaagatgatgaactcaactttggttggtcagatgggaaacgtcttcattttagtcgctgggctgaaactaatgggcaactcgaagactgtgtagtattagacactgatggattctggaaaacagttgattgcaatgacaatcaaccaggtgctatttgctactattcaggaaatgagactgaaaaagaggtcaaaccagttgacagtgttaaatgtccatctcctgttctaaatactccgtggataccatttcagaactgttgctacaatttcataataacaaagaataggcatatggcaacaacacaggatgaagttcatactaaatgccagaaactgaatccaaaatcacatattctgagtattcgagatgaaaaggagaataactttgttcttgagcaactgctgtacttcaattatatggcttcatgggtcatgttaggaataacttatagaaataagtctcttatgtggtttgataagaccccactgtcatatacacattggagagcaggaagaccaactataaaaaatgagaagtttttggctggtttaagtactgacggcttctgggatattcaaacctttaaagttattgaagaagcagtttattttcaccagcacagcattcttgcttgtaaaattgaaatggttgactacaaagaagaatataatactacactgccacagtttatgccatatgaagatggtatttacagtgttattcaaaaaaaggtaacatggtatgaagcattaaacatgtgttctcaaagtggaggtcacttggcaagcgttcacaaccaaaatggccagctctttctggaagatattgtaaaacgtgatggatttccactatgggttgggctctcaagtcatgatggaagtgaatcaagttttgaatggtctgatggtagtacatttgactatatcccatggaaaggccaaacatctcctggaaattgtgttctcttggatccaaaaggaacttggaaacatgaaaaatgcaactctgttaaggatggtgctatttgttataaacctacaaaatctaaaaagctgtcccgtcttacatattcatcaagatgtccagcagcaaaagagaatgggtcacggtggatccagtacaagggtcactgttacaagtctgatcaggcattgcacagtttttcagaggccaaaaaattgtgttcaaaacatgatcactctgcaactatcgtttccataaaagatgaagatgagaataaatttgtgagcagactgatgagggaaaataataacattaccatgagagtttggcttggattatctcaacattctgttgaccagtcttggagttggttagatggatcagaagtgacatttgtcaaatgggaaaataaaagtaagagtggtgttggaagatgtagcatgttgatagcttcaaatgaaacttggaaaaaagttgaatgtgaacatggttttggaagagttgtctgcaaagtgcctctggactgtccttcatctacttggattcagttccaagacagttgttacatttttctccaagaagccatcaaagtagaaagcatagaggatgtcagaaatcagtgtactgaccatggagcggacatgataagcatacataatgaagaagaaaatgcttttatactggatactttgaaaaagcaatggaaaggcccagatgatatcctactaggcatgttttatgacacagatgatgcgagtttcaagtggtttgataattcaaatatgacatttgataagtggacagaccaagatgatgatgaggatttagttgacacctgtgcttttctgcacatcaagacaggtgaatggaaaaaaggaaattgtgaagtttcttctgtggaaggaacactatgcaaaacagctatcccatacaaaaggaaatatttatcagataaccacattttaatatcagcattggtgattgctagcacggtaattttgacagttttgggagcaatcatttggttcctgtacaaaaaacattctgattctcgtttcaccacagttttttcaaccgcaccccaatcaccttataatgaagactgtgttttggtagttggagaagaaaatgaatatcctgttcaatttgactaa

SEQ ID NO: 27 - DNA, 5482 bp, Homo sapiens
  source 1..5482: mol_type = genomic DNA
ccggccggaaggcttgcgccagctcaggatgaggacaggctgggcgacccctcgccgcccggcggggctcctcatgctgctcttctggttcttcgatctcgcggagccctctggccgcgcagctaatgaccccttcaccatcgtccatggaaatacgggcaagtgcatcaagccagtgtatggctggatagtagcagacgactgtgatgaaactgaggacaagttatggaagtgggtgtcccagcatcggctctttcatttgcactcccaaaagtgccttggcctcgatattaccaaatcggtaaatgagctgagaatgttcagctgtgactccagtgccatgctgtggtggaaatgtgagcaccactctctgtacggagctgcccggtaccggctggctctgaaggatggacatggcacagcaatctcaaatgcatctgatgtctggaagaaaggaggctcagaggaaagcctttgtgaccagccttatcatgagatctataccagagatgggaactcttatgggagaccttgtgaatttccattcttaattgatgggacctggcatcatgattgcattcttgatgaagatcatagtgggccatggtgtgccaccaccttaaattatgaatatgaccgaaagtggggcatctgcttaaagcctgaaaacggttgtgaagataattgggaaaagaacgagcagtttggaagttgctaccaatttaatactcagacggctctttcttggaaagaagcttatgtttcatgtcagaatcaaggagctgatttactgagcatcaacagtgctgctgaattaacttaccttaaagaaaaagaaggcattgctaagattttctggattggtttaaatcagctatactctgctagaggctgggaatggtcagaccacaaaccattaaactttctcaactgggatccagacaggcccagtgcacctactataggtggctccagctgtgcaagaatggatgctgagtctggtctgtggcagagcttttcctgtgaagctcaactgccctatgtctgcaggaaaccattaaataatacagtggagttaacagatgtctggacatactcagatacccgctgtgatgcaggctggctgccaaataatggattttgctatctgctggtaaatgaaagtaattcctgggataaggcacatgcgaaatgcaaagccttcagtagtgacctaatcagcattcattctctagcagatgtggaggtggttgtcacaaaactccataatgaggatatcaaagaagaagtgtggataggccttaagaacataaacataccaactttatttcagtggtcagatggtactgaagttactctaacatattgggatgagaatgagccaaatgttccctacaataagacgcccaactgtgtttcctacttaggagagctaggtcagtggaaagtccaatcatgtgaggagaaactaaaatatgtatgcaagagaaagggagaaaaactgaatgacgcaagttctgataagatgtgtcctccagatgagggctggaagagacatggagaaacctgttacaagatttatgaggatgaggtcccttttggaacaaactgcaatctgactatcactagcagatttgagcaagaatacctaaatgatttgatgaaaaagtatgataaatctctaagaaaatacttctggactggcctgagagatgtagattcttgtggagagtataactgggcaactgttggtggaagaaggcgggctgtaaccttttccaactggaattttcttgagccagcttccccgggcggctgcgtggctatgtctactggaaagtctgttggaaagtgggaggtgaaggactgcagaagcttcaaagcactttcaatttgcaagaaaatgagtggaccccttgggcctgaagaagcatcccctaagcctgatgacccctgtcctgaaggctggcagagtttccccgcaagtctttcttgttataaggtattccatgcagaaagaattgtaagaaagaggaactgggaagaagctgaacgattctgccaagcccttggagcacacctttctagcttcagccatgtggatgaaataaaggaatttcttcactttttaacggaccagttcagtggccagcattggctgtggattggtttgaataaaaggagcccagatttacaaggatcctggcaatggagtgatcgtacaccagtgtctactattatcatgccaaatgagtttcagcaggattatgacatcagagactgtgctgctgtcaaggtatttcataggccatggcgaagaggctggcatttctatgatgatagagaatttatttatttgaggccttttgcttgtgatacaaaacttgaatgggtgtgccaaattccaaaaggccgtactccaaaaacaccagactggtacaatccagaccgtgctggaattcatggacctccacttataattgaaggaagtgaatattggtttgttgctgatcttcacctaaactatgaagaagccgtcctgtactgtgccagcaatcacagctttcttgcaactataacatcttttgtgggactaaaagccatcaaaaacaaaatagcaaatatatctggtgatggacagaagtggtggataagaattagcgagtggccaatagatgatcattttacatactcacgatatccatggcaccgctttcctgtgacatttggagaggaatgcttgtacatgtctgccaagacttggcttatcgacttaggtaaaccaacagactgtagtaccaagttgcccttcatctgtgaaaaatataatgtttcttcgttagagaaatacagcccagattctgcagctaaagtgcaatgttctgagcaatggattccttttcagaataagtgttttctaaagatcaaacccgtgtctctcacattttctcaagcaagcgatacctgtcactcctatggtggcacccttccttcagtgttgagccagattgaacaagactttattacatccttgcttccggatatggaagctactttatggattggtttgcgctggactgcctatgaaaagataaacaaatggacagataacagagagctgacgtacagtaactttcacccattattggttagtgggaggctgagaataccagaaaatttttttgaggaagagtctcgctaccactgtgccctaatactcaacctccaaaaatcaccgtttactgggacgtggaattttacatcctgcagtgaacgccactttgtgtctctctgtcagaaatattcagaagttaaaagcagacagacgttgcagaatgcttcagaaactgtaaagtatctaaataatctgtacaaaataatcccaaagactctgacttggcacagtgctaaaagggagtgtctgaaaagtaacatgcagctggtgagcatcacggacccttaccagcaggcattcctcagtgtgcaggcgctccttcacaactcttccttatggatcggactcttcagtcaagatgatgaactcaactttggttggtcagatgggaaacgtcttcattttagtcgctgggctgaaactaatgggcaactcgaagactgtgtagtattagacactgatggattctggaaaacagttgattgcaatgacaatcaaccaggtgctatttgctactattcaggaaatgagactgaaaaagaggtcaaaccagttgacagtgttaaatgtccatctcctgttctaaatactccgtggataccatttcagaactgttgctacaatttcataataacaaagaataggcatatggcaacaacacaggatgaagttcatactaaatgccagaaactgaatccaaaatcacatattctgagtattcgagatgaaaaggagaataactttgttcttgagcaactgctgtacttcaattatatggcttcatgggtcatgttaggaataacttatagaaataagtctcttatgtggtttgataagaccccactgtcatatacacattggagagcaggaagaccaactataaaaaatgagaagtttttggctggtttaagtactgacggcttctgggatattcaaacctttaaagttattgaagaagcagtttattttcaccagcacagcattcttgcttgtaaaattgaaatggttgactacaaagaagaatataatactacactgccacagtttatgccatatgaagatggtatttacagtgttattcaaaaaaaggtaacatggtatgaagcattaaacatgtgttctcaaagtggaggtcacttggcaagcgttcacaaccaaaatggccagctctttctggaagatattgtaaaacgtgatggatttccactatgggttgggctctcaagtcatgatggaagtgaatcaagttttgaatggtctgatggtagtacatttgactatatcccatggaaaggccaaacatctcctggaaattgtgttctcttggatccaaaaggaacttggaaacatgaaaaatgcaactctgttaaggatggtgctatttgttataaacctacaaaatctaaaaagctgtcccgtcttacatattcatcaagatgtccagcagcaaaagagaatgggtcacggtggatccagtacaagggtcactgttacaagtctgatcaggcattgcacagtttttcagaggccaaaaaattgtgttcaaaacatgatcactctgcaactatcgtttccataaaagatgaagatgagaataaatttgtgagcagactgatgagggaaaataataacattaccatgagagtttggcttggattatctcaacattctgttgactgtccttcatctacttggattcagttccaagacagttgttacatttttctccaagaagccatcaaagtagaaagcatagaggatgtcagaaatcagtgtactgaccatggagcggacatgataagcatacataatgaagaagaaaatgcttttatactggatactttgaaaaagcaatggaaaggcccagatgatatcctactaggcatgttttatgacacagatgatgcgagtttcaagtggtttgataattcaaatatgacatttgataagtggacagaccaagatgatgatgaggatttagttgacacctgtgcttttctgcacatcaagacaggtgaatggaaaaaaggaaattgtgaagtttcttctgtggaaggaacactatgcaaaacagctatcccatacaaaaggaaatatttatcagataaccacattttaatatcagcattggtgattgctagcacggtaattttgacagttttgggagcaatcatttggttcctgtacaaaaaacattctgattctcgtttcaccacagttttttcaaccgcaccccaatcaccttataatgaagactgtgttttggtagttggagaagaaaatgaatatcctgttcaatttgactaa

SEQ ID NO: 28 - DNA, 8919 bp, Homo sapiens
  source 1..8919: mol_type = genomic DNA
aggccgcgctcagcaggcggggcgggagccgcgtgcgcccgaggacccggccggaaggcttgcgccagctcaggatgaggacaggctgggcgacccctcgccgcccggcggggctcctcatgctgctcttctggttcttcgatctcgcggagccctctggccgcgcagctaatgaccccttcaccatcgtccatggaaatacgggcaagtgcatcaagccagtgtatggctggatagtagcagacgactgtgatgaaactgaggacaagttatggaagtgggtgtcccagcatcggctctttcatttgcactcccaaaagtgccttggcctcgatattaccaaatcggtaaatgagctgagaatgttcagctgtgactccagtgccatgctgtggtggaaatgtgagcaccactctctgtacggagctgcccggtaccggctggctctgaaggatggacatggcacagcaatctcaaatgcatctgatgtctggaagaaaggaggctcagaggaaagcctttgtgaccagccttatcatgagatctataccagagatgggaactcttatgggagaccttgtgaatttccattcttaattgatgggacctggcatcatgattgcattcttgatgaagatcatagtgggccatggtgtgccaccaccttaaattatgaatatgaccgaaagtggggcatctgcttaaagcctgaaaacggttgtgaagataattgggaaaagaacgagcagtttggaagttgctaccaatttaatactcagacggctctttcttggaaagaagcttatgtttcatgtcagaatcaaggagctgatttactgagcatcaacagtgctgctgaattaacttaccttaaagaaaaagaaggcattgctaagattttctggattggtttaaatcagctatactctgctagaggctgggaatggtcagaccacaaaccattaaactttctcaactgggatccagacaggcccagtgcacctactataggtggctccagctgtgcaagaatggatgctgagtctggtctgtggcagagcttttcctgtgaagctcaactgccctatgtctgcaggaaaccattaaataatacagtggagttaacagatgtctggacatactcagatacccgctgtgatgcaggctggctgccaaataatggattttgctatctgctggtaaatgaaagtaattcctgggataaggcacatgcgaaatgcaaagccttcagtagtgacctaatcagcattcattctctagcagatgtggaggtggttgtcacaaaactccataatgaggatatcaaagaagaagtgtggataggccttaagaacataaacataccaactttatttcagtggtcagatggtactgaagttactctaacatattgggatgagaatgagccaaatgttccctacaataagacgcccaactgtgtttcctacttaggagagctaggtcagtggaaagtccaatcatgtgaggagaaactaaaatatgtatgcaagagaaagggagaaaaactgaatgacgcaagttctgataagatgtgtcctccagatgagggctggaagagacatggagaaacctgttacaagatttatgaggatgaggtcccttttggaacaaactgcaatctgactatcactagcagatttgagcaagaatacctaaatgatttgatgaaaaagtatgataaatctctaagaaaatacttctggactggcctgagagatgtagattcttgtggagagtataactgggcaactgttggtggaagaaggcgggctgtaaccttttccaactggaattttcttgagccagcttccccgggcggctgcgtggctatgtctactggaaagtctgttggaaagtgggaggtgaaggactgcagaagcttcaaagcactttcaatttgcaagaaaatgagtggaccccttgggcctgaagaagcatcccctaagcctgatgacccctgtcctgaaggctggcagagtttccccgcaagtctttcttgttataaggtattccatgcagaaagaattgtaagaaagaggaactgggaagaagctgaacgattctgccaagcccttggagcacacctttctagcttcagccatgtggatgaaataaaggaatttcttcactttttaacggaccagttcagtggccagcattggctgtggattggtttgaataaaaggagcccagatttacaaggatcctggcaatggagtgatcgtacaccagtgtctactattatcatgccaaatgagtttcagcaggattatgacatcagagactgtgctgctgtcaaggtatttcataggccatggcgaagaggctggcatttctatgatgatagagaatttatttatttgaggccttttgcttgtgatacaaaacttgaatgggtgtgccaaattccaaaaggccgtactccaaaaacaccagactggtacaatccagaccgtgctggaattcatggacctccacttataattgaaggaagtgaatattggtttgttgctgatcttcacctaaactatgaagaagccgtcctgtactgtgccagcaatcacagctttcttgcaactataacatcttttgtgggactaaaagccatcaaaaacaaaatagcaaatatatctggtgatggacagaagtggtggataagaattagcgagtggccaatagatgatcattttacatactcacgatatccatggcaccgctttcctgtgacatttggagaggaatgcttgtacatgtctgccaagacttggcttatcgacttaggtaaaccaacagactgtagtaccaagttgcccttcatctgtgaaaaatataatgtttcttcgttagagaaatacagcccagattctgcagctaaagtgcaatgttctgagcaatggattccttttcagaataagtgttttctaaagatcaaacccgtgtctctcacattttctcaagcaagcgatacctgtcactcctatggtggcacccttccttcagtgttgagccagattgaacaagactttattacatccttgcttccggatatggaagctactttatggattggtttgcgctggactgcctatgaaaagataaacaaatggacagataacagagagctgacgtacagtaactttcacccattattggttagtgggaggctgagaataccagaaaatttttttgaggaagagtctcgctaccactgtgccctaatactcaacctccaaaaatcaccgtttactgggacgtggaattttacatcctgcagtgaacgccactttgtgtctctctgtcagaaatattcagaagttaaaagcagacagacgttgcagaatgcttcagaaactgtaaagtatctaaataatctgtacaaaataatcccaaagactctgacttggcacagtgctaaaagggagtgtctgaaaagtaacatgcagctggtgagcatcacggacccttaccagcaggcattcctcagtgtgcaggcgctccttcacaactcttccttatggatcggactcttcagtcaagatgatgaactcaactttggttggtcagatgggaaacgtcttcattttagtcgctgggctgaaactaatgggcaactcgaagactgtgtagtattagacactgatggattctggaaaacagttgattgcaatgacaatcaaccaggtgctatttgctactattcaggaaatgagactgaaaaagaggtcaaaccagttgacagtgttaaatgtccatctcctgttctaaatactccgtggataccatttcagaactgttgctacaatttcataataacaaagaataggcatatggcaacaacacaggatgaagttcatactaaatgccagaaactgaatccaaaatcacatattctgagtattcgagatgaaaaggagaataactttgttcttgagcaactgctgtacttcaattatatggcttcatgggtcatgttaggaataacttatagaaataagtctcttatgtggtttgataagaccccactgtcatatacacattggagagcaggaagaccaactataaaaaatgagaagtttttggctggtttaagtactgacggcttctgggatattcaaacctttaaagttattgaagaagcagtttattttcaccagcacagcattcttgcttgtaaaattgaaatggttgactacaaagaagaatataatactacactgccacagtttatgccatatgaagatggtatttacagtgttattcaaaaaaaggtaacatggtatgaagcattaaacatgtgttctcaaagtggaggtcacttggcaagcgttcacaaccaaaatggccagctctttctggaagatattgtaaaacgtgatggatttccactatgggttgggctctcaagtcatgatggaagtgaatcaagttttgaatggtctgatggtagtacatttgactatatcccatggaaaggccaaacatctcctggaaattgtgttctcttggatccaaaaggaacttggaaacatgaaaaatgcaactctgttaaggatggtgctatttgttataaacctacaaaatctaaaaagctgtcccgtcttacatattcatcaagatgtccagcagcaaaagagaatgggtcacggtggatccagtacaagggtcactgttacaagtctgatcaggcattgcacagtttttcagaggccaaaaaattgtgttcaaaacatgatcactctgcaactatcgtttccataaaagatgaagatgagaataaatttgtgagcagactgatgagggaaaataataacattaccatgagagtttggcttggattatctcaacattctgttgaccagtcttggagttggttagatggatcagaagtgacatttgtcaaatgggaaaataaaagtaagagtggtgttggaagatgtagcatgttgatagcttcaaatgaaacttggaaaaaagttgaatgtgaacatggttttggaagagttgtctgcaaagtgcctctggactgtccttcatctacttggattcagttccaagacagttgttacatttttctccaagaagccatcaaagtagaaagcatagaggatgtcagaaatcagtgtactgaccatggagcggacatgataagcatacataatgaagaagaaaatgcttttatactggatactttgaaaaagcaatggaaaggcccagatgatatcctactaggcatgttttatgacacagatgatgcgagtttcaagtggtttgataattcaaatatgacatttgataagtggacagaccaagatgatgatgaggatttagttgacacctgtgcttttctgcacatcaagacaggtgaatggaaaaaaggaaattgtgaagtttcttctgtggaaggaacactatgcaaaacagctatcccatacaaaaggaaatatttatcagataaccacattttaatatcagcattggtgattgctagcacggtaattttgacagttttgggagcaatcatttggttcctgtacaaaaaacattctgattctcgtttcaccacagttttttcaaccgcaccccaatcaccttataatgaagactgtgttttggtagttggagaagaaaatgaatatcctgttcaatttgactaagtttttggtaatcttgcactaagacatcaacaaaatgccctggcagagataacttgggaaagattttaatataaaacttgacattggatattagagctttaatggtattccttattccagtaacatttttatgtactcatctgctgtgaaaagtctttaggttcattaaaaaaacaggttttagaaatgatcttagatctaatatagtgattttaagcatcccgtcaaaggcagaatctgtcacttgaatgaaggaaagcttaaagcccaagcagataaaaataaaagcccagcctatttgtcttgcctgctgtatcttccctatttagttgacccactttagtttatatgtttattagtaaacatgaaatggggaataagtgattttaagtacatcccatacatttaaatatctttgataattgttatttttttggcagataattcctctagaatgtgtatctttttatgatttagatgaagaaaattttacaacttttaacaccccacaccaattttagtttcattacttttacacacaccattttatcacaaatgactcaagttttaatgaatgtttataaattatttgaaacaaaatatgatcgctgtgtccaggatggcatagagaaagctggcaattaggttaacacttacatattatagtgcccctttaaggatttctctcttgccaccataccttttgtactttcccctatacaagatgtatctcattctcctcaagcatttataaatttttccttcaatgacatgaaaactgtgcaagcaaaaaccgaagaaaaacacttaagtacaactgtagtgacagtgatcaaagttttcagtgcatttattgtacattttaagaaaaaggtgaaaatcatttggggagtaaaaaaatgaaaaagctgaaacgagtaattttcctcaccatcaataaaccaaaaacaggaaagataaagaatgtataaatttcacgtaaattagtcacgtatcacttatcaatggggatacgttctaagaaatgcatagttagggaatcttgtgtgaaaatcagcttgtatttacacaaacccagatggtagagcctattttgtcccaaacctacacagcatgttactgtgctgaatactgcagacaattgtaacacaatatttgtgtatctaaatatagaaaaggtacagtaaaaatatggtctactaaggaaacactgttctatatgtggtccattactgactgaagtatactgtctagaagtctgaggctcaaagaaaagtaatccctcttctgaatccacaccccatcaattatcttactttcttctggggagatagatagatatactatctcactagcttgactaatggcaacaaagttccagcttgtgtagtctctttttattgaccacatgaatcgaaaacactcatcacaattaatggcactatcattaatgagacatgagtaactaaaaagtgatagaaaactattaacagtgcggctacatggtactgaaaatgcaggcattacaccagctgttacacaagcacaagcatgctctgtaagagctttacatttctgagattttgtatagtgattgagatgtctattttattattgatagactattactaatgtcaatattgaacactaccctggaattcctgcctggttttcctacccaaattgtaccactccttgaagaactacaggcacagtaaaaaaaatatggcgtattatgtgaactaaaagagttctaaaggagttcttaaaggagtggtagaatttgggtaggaaagtgattaagtccaacttaaaaccaacagtctcaaacgtctacaactacaatgtccaatgagccactagccacatgaggctatttaagtaaatttagtttaaaatccagttttcgaattacattagccacattgtcaagtgttcaaatcacaggtggttagtggctactgtactgggcaacatacattatagaacattttcattataggaagttttattgggcagtgctgctcttaaatcctaccttccactcaactcccatacaactttcttttgtacattttgatactttctacctaatggcagctcttccaaaatagctgctttaaactctgatttaattttcaatatttggtttcatttttcaacaggccaagaggcctctggtaatgaagtgctatatatatatatatgatggagtctcactgtgctgcccaggctacagtgcagtggctcgatcttggctctctccaatctccgccttgcaggttttcaagcaattctcctgcctcagcctccttagtagctgggaccacagacatctgtcaccacacccagctaactttttgtatttttggtagagacggggtttcgccatattgactgggctggtctcaaactcctgacctcaagtgatccacccaccttggtctcccaaagtgctgggattacatgcgtgagccaccacacttggcctacattttttctttatataccagaacatctataacaggcaccttatctactcattagtgaagagataattggattacacaggcaggcttgtttactacatccagaatgtagaaactgctttcttcaacatcttggttctagctagtaataacaatataattctttggcagatattcagaataacattttaaactacattttcttagaaaattgcattcttgtagtgagcagtgtatggtctcttttgttcagaatttaaaactgataaccaatgaaagccttttctcttattcctctaccgtcatttacatgataatctgaagctaatatgacaatatttaaatactaagtggtactagggaactacaagaatactgtaaagcttaagccattgttatcactgtcatttagcatttaataacaaaactatacagaattatgtgcataccaatgaatgttttgtaccatctagttaaattttttaaataaagttttatgggttaagcagaagacaactgtcatactgaattttattaaaagtatatatacttcaaattcaaagcatcccttaggacccacagaatatattaaaactaccacccttaaattttatatttttgctttaagacagacaatgcaaaggtaactggcaagaggtgagcaaatgttttagaacatttatattattgcttaaaatgagatttgaaattgtaataaaattcttggttatgaa

SEQ ID NO: 29 - DNA, 8751 bp, Homo sapiens
  source 1..8751: mol_type = genomic DNA
aggccgcgctcagcaggcggggcgggagccgcgtgcgcccgaggacccggccggaaggcttgcgccagctcaggatgaggacaggctgggcgacccctcgccgcccggcggggctcctcatgctgctcttctggttcttcgatctcgcggagccctctggccgcgcagctaatgaccccttcaccatcgtccatggaaatacgggcaagtgcatcaagccagtgtatggctggatagtagcagacgactgtgatgaaactgaggacaagttatggaagtgggtgtcccagcatcggctctttcatttgcactcccaaaagtgccttggcctcgatattaccaaatcggtaaatgagctgagaatgttcagctgtgactccagtgccatgctgtggtggaaatgtgagcaccactctctgtacggagctgcccggtaccggctggctctgaaggatggacatggcacagcaatctcaaatgcatctgatgtctggaagaaaggaggctcagaggaaagcctttgtgaccagccttatcatgagatctataccagagatgggaactcttatgggagaccttgtgaatttccattcttaattgatgggacctggcatcatgattgcattcttgatgaagatcatagtgggccatggtgtgccaccaccttaaattatgaatatgaccgaaagtggggcatctgcttaaagcctgaaaacggttgtgaagataattgggaaaagaacgagcagtttggaagttgctaccaatttaatactcagacggctctttcttggaaagaagcttatgtttcatgtcagaatcaaggagctgatttactgagcatcaacagtgctgctgaattaacttaccttaaagaaaaagaaggcattgctaagattttctggattggtttaaatcagctatactctgctagaggctgggaatggtcagaccacaaaccattaaactttctcaactgggatccagacaggcccagtgcacctactataggtggctccagctgtgcaagaatggatgctgagtctggtctgtggcagagcttttcctgtgaagctcaactgccctatgtctgcaggaaaccattaaataatacagtggagttaacagatgtctggacatactcagatacccgctgtgatgcaggctggctgccaaataatggattttgctatctgctggtaaatgaaagtaattcctgggataaggcacatgcgaaatgcaaagccttcagtagtgacctaatcagcattcattctctagcagatgtggaggtggttgtcacaaaactccataatgaggatatcaaagaagaagtgtggataggccttaagaacataaacataccaactttatttcagtggtcagatggtactgaagttactctaacatattgggatgagaatgagccaaatgttccctacaataagacgcccaactgtgtttcctacttaggagagctaggtcagtggaaagtccaatcatgtgaggagaaactaaaatatgtatgcaagagaaagggagaaaaactgaatgacgcaagttctgataagatgtgtcctccagatgagggctggaagagacatggagaaacctgttacaagatttatgaggatgaggtcccttttggaacaaactgcaatctgactatcactagcagatttgagcaagaatacctaaatgatttgatgaaaaagtatgataaatctctaagaaaatacttctggactggcctgagagatgtagattcttgtggagagtataactgggcaactgttggtggaagaaggcgggctgtaaccttttccaactggaattttcttgagccagcttccccgggcggctgcgtggctatgtctactggaaagtctgttggaaagtgggaggtgaaggactgcagaagcttcaaagcactttcaatttgcaagaaaatgagtggaccccttgggcctgaagaagcatcccctaagcctgatgacccctgtcctgaaggctggcagagtttccccgcaagtctttcttgttataaggtattccatgcagaaagaattgtaagaaagaggaactgggaagaagctgaacgattctgccaagcccttggagcacacctttctagcttcagccatgtggatgaaataaaggaatttcttcactttttaacggaccagttcagtggccagcattggctgtggattggtttgaataaaaggagcccagatttacaaggatcctggcaatggagtgatcgtacaccagtgtctactattatcatgccaaatgagtttcagcaggattatgacatcagagactgtgctgctgtcaaggtatttcataggccatggcgaagaggctggcatttctatgatgatagagaatttatttatttgaggccttttgcttgtgatacaaaacttgaatgggtgtgccaaattccaaaaggccgtactccaaaaacaccagactggtacaatccagaccgtgctggaattcatggacctccacttataattgaaggaagtgaatattggtttgttgctgatcttcacctaaactatgaagaagccgtcctgtactgtgccagcaatcacagctttcttgcaactataacatcttttgtgggactaaaagccatcaaaaacaaaatagcaaatatatctggtgatggacagaagtggtggataagaattagcgagtggccaatagatgatcattttacatactcacgatatccatggcaccgctttcctgtgacatttggagaggaatgcttgtacatgtctgccaagacttggcttatcgacttaggtaaaccaacagactgtagtaccaagttgcccttcatctgtgaaaaatataatgtttcttcgttagagaaatacagcccagattctgcagctaaagtgcaatgttctgagcaatggattccttttcagaataagtgttttctaaagatcaaacccgtgtctctcacattttctcaagcaagcgatacctgtcactcctatggtggcacccttccttcagtgttgagccagattgaacaagactttattacatccttgcttccggatatggaagctactttatggattggtttgcgctggactgcctatgaaaagataaacaaatggacagataacagagagctgacgtacagtaactttcacccattattggttagtgggaggctgagaataccagaaaatttttttgaggaagagtctcgctaccactgtgccctaatactcaacctccaaaaatcaccgtttactgggacgtggaattttacatcctgcagtgaacgccactttgtgtctctctgtcagaaatattcagaagttaaaagcagacagacgttgcagaatgcttcagaaactgtaaagtatctaaataatctgtacaaaataatcccaaagactctgacttggcacagtgctaaaagggagtgtctgaaaagtaacatgcagctggtgagcatcacggacccttaccagcaggcattcctcagtgtgcaggcgctccttcacaactcttccttatggatcggactcttcagtcaagatgatgaactcaactttggttggtcagatgggaaacgtcttcattttagtcgctgggctgaaactaatgggcaactcgaagactgtgtagtattagacactgatggattctggaaaacagttgattgcaatgacaatcaaccaggtgctatttgctactattcaggaaatgagactgaaaaagaggtcaaaccagttgacagtgttaaatgtccatctcctgttctaaatactccgtggataccatttcagaactgttgctacaatttcataataacaaagaataggcatatggcaacaacacaggatgaagttcatactaaatgccagaaactgaatccaaaatcacatattctgagtattcgagatgaaaaggagaataactttgttcttgagcaactgctgtacttcaattatatggcttcatgggtcatgttaggaataacttatagaaataagtctcttatgtggtttgataagaccccactgtcatatacacattggagagcaggaagaccaactataaaaaatgagaagtttttggctggtttaagtactgacggcttctgggatattcaaacctttaaagttattgaagaagcagtttattttcaccagcacagcattcttgcttgtaaaattgaaatggttgactacaaagaagaatataatactacactgccacagtttatgccatatgaagatggtatttacagtgttattcaaaaaaaggtaacatggtatgaagcattaaacatgtgttctcaaagtggaggtcacttggcaagcgttcacaaccaaaatggccagctctttctggaagatattgtaaaacgtgatggatttccactatgggttgggctctcaagtcatgatggaagtgaatcaagttttgaatggtctgatggtagtacatttgactatatcccatggaaaggccaaacatctcctggaaattgtgttctcttggatccaaaaggaacttggaaacatgaaaaatgcaactctgttaaggatggtgctatttgttataaacctacaaaatctaaaaagctgtcccgtcttacatattcatcaagatgtccagcagcaaaagagaatgggtcacggtggatccagtacaagggtcactgttacaagtctgatcaggcattgcacagtttttcagaggccaaaaaattgtgttcaaaacatgatcactctgcaactatcgtttccataaaagatgaagatgagaataaatttgtgagcagactgatgagggaaaataataacattaccatgagagtttggcttggattatctcaacattctgttgactgtccttcatctacttggattcagttccaagacagttgttacatttttctccaagaagccatcaaagtagaaagcatagaggatgtcagaaatcagtgtactgaccatggagcggacatgataagcatacataatgaagaagaaaatgcttttatactggatactttgaaaaagcaatggaaaggcccagatgatatcctactaggcatgttttatgacacagatgatgcgagtttcaagtggtttgataattcaaatatgacatttgataagtggacagaccaagatgatgatgaggatttagttgacacctgtgcttttctgcacatcaagacaggtgaatggaaaaaaggaaattgtgaagtttcttctgtggaaggaacactatgcaaaacagctatcccatacaaaaggaaatatttatcagataaccacattttaatatcagcattggtgattgctagcacggtaattttgacagttttgggagcaatcatttggttcctgtacaaaaaacattctgattctcgtttcaccacagttttttcaaccgcaccccaatcaccttataatgaagactgtgttttggtagttggagaagaaaatgaatatcctgttcaatttgactaagtttttggtaatcttgcactaagacatcaacaaaatgccctggcagagataacttgggaaagattttaatataaaacttgacattggatattagagctttaatggtattccttattccagtaacatttttatgtactcatctgctgtgaaaagtctttaggttcattaaaaaaacaggttttagaaatgatcttagatctaatatagtgattttaagcatcccgtcaaaggcagaatctgtcacttgaatgaaggaaagcttaaagcccaagcagataaaaataaaagcccagcctatttgtcttgcctgctgtatcttccctatttagttgacccactttagtttatatgtttattagtaaacatgaaatggggaataagtgattttaagtacatcccatacatttaaatatctttgataattgttatttttttggcagataattcctctagaatgtgtatctttttatgatttagatgaagaaaattttacaacttttaacaccccacaccaattttagtttcattacttttacacacaccattttatcacaaatgactcaagttttaatgaatgtttataaattatttgaaacaaaatatgatcgctgtgtccaggatggcatagagaaagctggcaattaggttaacacttacatattatagtgcccctttaaggatttctctcttgccaccataccttttgtactttcccctatacaagatgtatctcattctcctcaagcatttataaatttttccttcaatgacatgaaaactgtgcaagcaaaaaccgaagaaaaacacttaagtacaactgtagtgacagtgatcaaagttttcagtgcatttattgtacattttaagaaaaaggtgaaaatcatttggggagtaaaaaaatgaaaaagctgaaacgagtaattttcctcaccatcaataaaccaaaaacaggaaagataaagaatgtataaatttcacgtaaattagtcacgtatcacttatcaatggggatacgttctaagaaatgcatagttagggaatcttgtgtgaaaatcagcttgtatttacacaaacccagatggtagagcctattttgtcccaaacctacacagcatgttactgtgctgaatactgcagacaattgtaacacaatatttgtgtatctaaatatagaaaaggtacagtaaaaatatggtctactaaggaaacactgttctatatgtggtccattactgactgaagtatactgtctagaagtctgaggctcaaagaaaagtaatccctcttctgaatccacaccccatcaattatcttactttcttctggggagatagatagatatactatctcactagcttgactaatggcaacaaagttccagcttgtgtagtctctttttattgaccacatgaatcgaaaacactcatcacaattaatggcactatcattaatgagacatgagtaactaaaaagtgatagaaaactattaacagtgcggctacatggtactgaaaatgcaggcattacaccagctgttacacaagcacaagcatgctctgtaagagctttacatttctgagattttgtatagtgattgagatgtctattttattattgatagactattactaatgtcaatattgaacactaccctggaattcctgcctggttttcctacccaaattgtaccactccttgaagaactacaggcacagtaaaaaaaatatggcgtattatgtgaactaaaagagttctaaaggagttcttaaaggagtggtagaatttgggtaggaaagtgattaagtccaacttaaaaccaacagtctcaaacgtctacaactacaatgtccaatgagccactagccacatgaggctatttaagtaaatttagtttaaaatccagttttcgaattacattagccacattgtcaagtgttcaaatcacaggtggttagtggctactgtactgggcaacatacattatagaacattttcattataggaagttttattgggcagtgctgctcttaaatcctaccttccactcaactcccatacaactttcttttgtacattttgatactttctacctaatggcagctcttccaaaatagctgctttaaactctgatttaattttcaatatttggtttcatttttcaacaggccaagaggcctctggtaatgaagtgctatatatatatatatgatggagtctcactgtgctgcccaggctacagtgcagtggctcgatcttggctctctccaatctccgccttgcaggttttcaagcaattctcctgcctcagcctccttagtagctgggaccacagacatctgtcaccacacccagctaactttttgtatttttggtagagacggggtttcgccatattgactgggctggtctcaaactcctgacctcaagtgatccacccaccttggtctcccaaagtgctgggattacatgcgtgagccaccacacttggcctacattttttctttatataccagaacatctataacaggcaccttatctactcattagtgaagagataattggattacacaggcaggcttgtttactacatccagaatgtagaaactgctttcttcaacatcttggttctagctagtaataacaatataattctttggcagatattcagaataacattttaaactacattttcttagaaaattgcattcttgtagtgagcagtgtatggtctcttttgttcagaatttaaaactgataaccaatgaaagccttttctcttattcctctaccgtcatttacatgataatctgaagctaatatgacaatatttaaatactaagtggtactagggaactacaagaatactgtaaagcttaagccattgttatcactgtcatttagcatttaataacaaaactatacagaattatgtgcataccaatgaatgttttgtaccatctagttaaattttttaaataaagttttatgggttaagcagaagacaactgtcatactgaattttattaaaagtatatatacttcaaattcaaagcatcccttaggacccacagaatatattaaaactaccacccttaaattttatatttttgctttaagacagacaatgcaaaggtaactggcaagaggtgagcaaatgttttagaacatttatattattgcttaaaatgagatttgaaattgtaataaaattcttggttatgaa

SEQ ID NO: 30 - DNA, 5622 bp, Homo sapiens
  source 1..5622: mol_type = genomic DNA
atgaggacaggctgggcgacccctcgccgcccggcggggctcctcatgctgctcttctggttcttcgatctcgcggagccctctggccgcgcagctaatgaccccttcaccatcgtccatggaaatacgggcaagtgcatcaagccagtgtatggctggatagtagcagacgactgtgatgaaactgaggacaagttatggaagtgggtgtcccagcatcggctctttcatttgcactcccaaaagtgccttggcctcgatattaccaaatcggtaaatgagctgagaatgttcagctgtgactccagtgccatgctgtggtggaaatgtgagcaccactctctgtacggagctgcccggtaccggctggctctgaaggatggacatggcacagcaatctcaaatgcatctgatgtctggaagaaaggaggctcagaggaaagcctttgtgaccagccttatcatgagatctataccagagatgggaactcttatgggagaccttgtgaatttccattcttaattgatgggacctggcatcatgattgcattcttgatgaagatcatagtgggccatggtgtgccaccaccttaaattatgaatatgaccgaaagtggggcatctgcttaaagcctgaaaacggttgtgaagataattgggaaaagaacgagcagtttggaagttgctaccaatttaatactcagacggctctttcttggaaagaagcttatgtttcatgtcagaatcaaggagctgatttactgagcatcaacagtgctgctgaattaacttaccttaaagaaaaagaaggcattgctaagattttctggattggtttaaatcagctatactctgctagaggctgggaatggtcagaccacaaaccattaaactttctcaactgggatccagacaggcccagtgcacctactataggtggctccagctgtgcaagaatggatgctgagtctggtctgtggcagagcttttcctgtgaagctcaactgccctatgtctgcaggaaaccattaaataatacagtggagttaacagatgtctggacatactcagatacccgctgtgatgcaggctggctgccaaataatggattttgctatctgctggtaaatgaaagtaattcctgggataaggcacatgcgaaatgcaaagccttcagtagtgacctaatcagcattcattctctagcagatgtggaggtggttgtcacaaaactccataatgaggatatcaaagaagaagtgtggataggccttaagaacataaacataccaactttatttcagtggtcagatggtactgaagttactctaacatattgggatgagaatgagccaaatgttccctacaataagacgcccaactgtgtttcctacttaggagagctaggtcagtggaaagtccaatcatgtgaggagaaactaaaatatgtatgcaagagaaagggagaaaaactgaatgacgcaagttctgataagatgtgtcctccagatgagggctggaagagacatggagaaacctgttacaagatttatgaggatgaggtcccttttggaacaaactgcaatctgactatcactagcagatttgagcaagaatacctaaatgatttgatgaaaaagtatgataaatctctaagaaaatacttctggactggcctgagagatgtagattcttgtggagagtataactgggcaactgttggtggaagaaggcgggctgtaaccttttccaactggaattttcttgagccagcttccccgggcggctgcgtggctatgtctactggaaagtctgttggaaagtgggaggtgaaggactgcagaagcttcaaagcactttcaatttgcaagaaaatgagtggaccccttgggcctgaagaagcatcccctaagcctgatgacccctgtcctgaaggctggcagagtttccccgcaagtctttcttgttataaggtattccatgcagaaagaattgtaagaaagaggaactgggaagaagctgaacgattctgccaagcccttggagcacacctttctagcttcagccatgtggatgaaataaaggaatttcttcactttttaacggaccagttcagtggccagcattggctgtggattggtttgaataaaaggagcccagatttacaaggatcctggcaatggagtgatcgtacaccagtgtctactattatcatgccaaatgagtttcagcaggattatgacatcagagactgtgctgctgtcaaggtatttcataggccatggcgaagaggctggcatttctatgatgatagagaatttatttatttgaggccttttgcttgtgatacaaaacttgaatgggtgtgccaaattccaaaaggccgtactccaaaaacaccagactggtacaatccagaccgtgctggaattcatggacctccacttataattgaaggaagtgaatattggtttgttgctgatcttcacctaaactatgaagaagccgtcctgtactgtgccagcaatcacagctttcttgcgactataacatcttttgtgggactaaaagccatcaaaaacaaaatagcaaatatatctggtgatggacagaagtggtggataagaattagcgagtggccaatagatgatcattttacatactcacgatatccatggcaccgctttcctgtgacatttggagaggaatgcttgtacatgtctgccaagacttggcttatcgacttaggtaaaccaacagactgtagtaccaagttgcccttcatctgtgaaaaatataatgtttcttcgttagagaaatacagcccagattctgcagctaaagtgcaatgttctgagcaatggattccttttcagaataagtgttttctaaagatcaaacccgtgtctctcacattttctcaagcaagcgatacctgtcactcctatggtggcacccttccttcagtgttgagccagattgaacaagactttattacatccttgcttccggatatggaagctactttatggattggtttgcgctggactgcctatgaaaagataaacaaatggacagataacagagagctgacgtacagtaactttcacccattattggttagtgggaggctgagaataccagaaaatttttttgaggaagagtctcgctaccactgtgccctaatactcaacctccaaaaatcaccgtttactgggacgtggaattttacatcctgcagtgaacgccactttgtgtctctctgtcagaaatattcagaagttaaaagcagacagacgttgcagaatgcttcagaaactgtaaagtatctaaataatctgtacaaaataatcccaaagactctgacttggcacagtgctaaaagggagtgtctgaaaagtaacatgcagctggtgagcatcacggacccttaccagcaggcattcctcagtgtgcaggcgctccttcacaactcttccttatggatcggactcttcagtcaagatgatgaactcaactttggttggtcagatgggaaacgtcttcattttagtcgctgggctgaaactaatgggcaactcgaagactgtgtagtattagacactgatggattctggaaaacagttgattgcaatgacaatcaaccaggtgctatttgctactattcaggaaatgagactgaaaaagaggtcaaaccagttgacagtgttaaatgtccatctcctgttctaaatactccgtggataccatttcagaactgttgctacaatttcataataacaaagaataggcatatggcaacaacacaggatgaagttcatactaaatgccagaaactgaatccaaaatcacatattctgagtattcgagatgaaaaggagaataactttgttcttgagcaactgctgtacttcaattatatggcttcatgggtcatgttaggaataacttatagaaataattctcttatgtggtttgataagaccccactgtcatatacacattggagagcaggaagaccaactataaaaaatgagaagtttttggctggtttaagtactgacggcttctgggatattcaaacctttaaagttattgaagaagcagtttattttcaccagcacagcattcttgcttgtaaaattgaaatggttgactacaaagaagaacataatactacactgccacagtttatgccatatgaagatggtatttacagtgttattcaaaaaaaggtaacatggtatgaagcattaaacatgtgttctcaaagtggaggtcacttggcaagcgttcacaaccaaaatggccagctctttctggaagatattgtaaaacgtgatggatttccactatgggttgggctctcaagtcatgatggaagtgaatcaagttttgaatggtctgatggtagtacatttgactatatcccatggaaaggccaaacatctcctggaaattgtgttctcttggatccaaaaggaacttggaaacatgaaaaatgcaactctgttaaggatggtgctatttgttataaacctacaaaatctaaaaagctgtcccgtcttacatattcatcaagatgtccagcagcaaaagagaatgggtcacggtggatccagtacaagggtcactgttacaagtctgatcaggcattgcacagtttttcagaggccaaaaaattgtgttcaaaacatgatcactctgcaactatcgtttccataaaagatgaagatgagaataaatttgtgagcagactgatgagggaaaataataacattaccatgagagtttggcttggattatctcaacattctgttgaccagtcttggagttggttagatggatcagaagtgacatttgtcaaatgggaaaataaaagtaagagtggtgttggaagatgtagcatgttgatagcttcaaatgaaacttggaaaaaagttgaatgtgaacatggttttggaagagttgtctgcaaagtgcctctggactgtccttcatctacttggattcagttccaagacagttgttacatttttctccaagaagccatcaaagtagaaagcatagaggatgtcagaaatcagtgtactgaccatggagcggacatgataagcatacataatgaagaagaaaatgcttttatactggatactttgaaaaagcaatggaaaggcccagatgatatcctactaggcatgttttatgacacagatgatgcgagtttcaagtggtttgataattcaaatatgacatttgataagtggacagaccaagatgatgatgaggatttagttgacacctgtgcttttctgcacatcaagacaggtgaatggaaaaaaggaaattgtgaagtttcttctgtggaaggaacactatgcaaaacagctatcccatacaaaaggaaatatttatcagataaccacattttaatatcagcattggtgattgctagcacggtaattttgacagttttgggagcaatcatttggttcctgtacaaaaaacattctgattctcgtttcaccacagttttttcaaccgcaccccaatcaccttataatgaagactgtgttttggtagttggagaagaaaatgaatatcctgttcaatttgactaa

SEQ ID NO: 31 - DNA, 5454 bp, Homo sapiens
  source 1..5454: mol_type = genomic DNA
atgaggacaggctgggcgacccctcgccgcccggcggggctcctcatgctgctcttctggttcttcgatctcgcggagccctctggccgcgcagctaatgaccccttcaccatcgtccatggaaatacgggcaagtgcatcaagccagtgtatggctggatagtagcagacgactgtgatgaaactgaggacaagttatggaagtgggtgtcccagcatcggctctttcatttgcactcccaaaagtgccttggcctcgatattaccaaatcggtaaatgagctgagaatgttcagctgtgactccagtgccatgctgtggtggaaatgtgagcaccactctctgtacggagctgcccggtaccggctggctctgaaggatggacatggcacagcaatctcaaatgcatctgatgtctggaagaaaggaggctcagaggaaagcctttgtgaccagccttatcatgagatctataccagagatgggaactcttatgggagaccttgtgaatttccattcttaattgatgggacctggcatcatgattgcattcttgatgaagatcatagtgggccatggtgtgccaccaccttaaattatgaatatgaccgaaagtggggcatctgcttaaagcctgaaaacggttgtgaagataattgggaaaagaacgagcagtttggaagttgctaccaatttaatactcagacggctctttcttggaaagaagcttatgtttcatgtcagaatcaaggagctgatttactgagcatcaacagtgctgctgaattaacttaccttaaagaaaaagaaggcattgctaagattttctggattggtttaaatcagctatactctgctagaggctgggaatggtcagaccacaaaccattaaactttctcaactgggatccagacaggcccagtgcacctactataggtggctccagctgtgcaagaatggatgctgagtctggtctgtggcagagcttttcctgtgaagctcaactgccctatgtctgcaggaaaccattaaataatacagtggagttaacagatgtctggacatactcagatacccgctgtgatgcaggctggctgccaaataatggattttgctatctgctggtaaatgaaagtaattcctgggataaggcacatgcgaaatgcaaagccttcagtagtgacctaatcagcattcattctctagcagatgtggaggtggttgtcacaaaactccataatgaggatatcaaagaagaagtgtggataggccttaagaacataaacataccaactttatttcagtggtcagatggtactgaagttactctaacatattgggatgagaatgagccaaatgttccctacaataagacgcccaactgtgtttcctacttaggagagctaggtcagtggaaagtccaatcatgtgaggagaaactaaaatatgtatgcaagagaaagggagaaaaactgaatgacgcaagttctgataagatgtgtcctccagatgagggctggaagagacatggagaaacctgttacaagatttatgaggatgaggtcccttttggaacaaactgcaatctgactatcactagcagatttgagcaagaatacctaaatgatttgatgaaaaagtatgataaatctctaagaaaatacttctggactggcctgagagatgtagattcttgtggagagtataactgggcaactgttggtggaagaaggcgggctgtaaccttttccaactggaattttcttgagccagcttccccgggcggctgcgtggctatgtctactggaaagtctgttggaaagtgggaggtgaaggactgcagaagcttcaaagcactttcaatttgcaagaaaatgagtggaccccttgggcctgaagaagcatcccctaagcctgatgacccctgtcctgaaggctggcagagtttccccgcaagtctttcttgttataaggtattccatgcagaaagaattgtaagaaagaggaactgggaagaagctgaacgattctgccaagcccttggagcacacctttctagcttcagccatgtggatgaaataaaggaatttcttcactttttaacggaccagttcagtggccagcattggctgtggattggtttgaataaaaggagcccagatttacaaggatcctggcaatggagtgatcgtacaccagtgtctactattatcatgccaaatgagtttcagcaggattatgacatcagagactgtgctgctgtcaaggtatttcataggccatggcgaagaggctggcatttctatgatgatagagaatttatttatttgaggccttttgcttgtgatacaaaacttgaatgggtgtgccaaattccaaaaggccgtactccaaaaacaccagactggtacaatccagaccgtgctggaattcatggacctccacttataattgaaggaagtgaatattggtttgttgctgatcttcacctaaactatgaagaagccgtcctgtactgtgccagcaatcacagctttcttgcgactataacatcttttgtgggactaaaagccatcaaaaacaaaatagcaaatatatctggtgatggacagaagtggtggataagaattagcgagtggccaatagatgatcattttacatactcacgatatccatggcaccgctttcctgtgacatttggagaggaatgcttgtacatgtctgccaagacttggcttatcgacttaggtaaaccaacagactgtagtaccaagttgcccttcatctgtgaaaaatataatgtttcttcgttagagaaatacagcccagattctgcagctaaagtgcaatgttctgagcaatggattccttttcagaataagtgttttctaaagatcaaacccgtgtctctcacattttctcaagcaagcgatacctgtcactcctatggtggcacccttccttcagtgttgagccagattgaacaagactttattacatccttgcttccggatatggaagctactttatggattggtttgcgctggactgcctatgaaaagataaacaaatggacagataacagagagctgacgtacagtaactttcacccattattggttagtgggaggctgagaataccagaaaatttttttgaggaagagtctcgctaccactgtgccctaatactcaacctccaaaaatcaccgtttactgggacgtggaattttacatcctgcagtgaacgccactttgtgtctctctgtcagaaatattcagaagttaaaagcagacagacgttgcagaatgcttcagaaactgtaaagtatctaaataatctgtacaaaataatcccaaagactctgacttggcacagtgctaaaagggagtgtctgaaaagtaacatgcagctggtgagcatcacggacccttaccagcaggcattcctcagtgtgcaggcgctccttcacaactcttccttatggatcggactcttcagtcaagatgatgaactcaactttggttggtcagatgggaaacgtcttcattttagtcgctgggctgaaactaatgggcaactcgaagactgtgtagtattagacactgatggattctggaaaacagttgattgcaatgacaatcaaccaggtgctatttgctactattcaggaaatgagactgaaaaagaggtcaaaccagttgacagtgttaaatgtccatctcctgttctaaatactccgtggataccatttcagaactgttgctacaatttcataataacaaagaataggcatatggcaacaacacaggatgaagttcatactaaatgccagaaactgaatccaaaatcacatattctgagtattcgagatgaaaaggagaataactttgttcttgagcaactgctgtacttcaattatatggcttcatgggtcatgttaggaataacttatagaaataattctcttatgtggtttgataagaccccactgtcatatacacattggagagcaggaagaccaactataaaaaatgagaagtttttggctggtttaagtactgacggcttctgggatattcaaacctttaaagttattgaagaagcagtttattttcaccagcacagcattcttgcttgtaaaattgaaatggttgactacaaagaagaacataatactacactgccacagtttatgccatatgaagatggtatttacagtgttattcaaaaaaaggtaacatggtatgaagcattaaacatgtgttctcaaagtggaggtcacttggcaagcgttcacaaccaaaatggccagctctttctggaagatattgtaaaacgtgatggatttccactatgggttgggctctcaagtcatgatggaagtgaatcaagttttgaatggtctgatggtagtacatttgactatatcccatggaaaggccaaacatctcctggaaattgtgttctcttggatccaaaaggaacttggaaacatgaaaaatgcaactctgttaaggatggtgctatttgttataaacctacaaaatctaaaaagctgtcccgtcttacatattcatcaagatgtccagcagcaaaagagaatgggtcacggtggatccagtacaagggtcactgttacaagtctgatcaggcattgcacagtttttcagaggccaaaaaattgtgttcaaaacatgatcactctgcaactatcgtttccataaaagatgaagatgagaataaatttgtgagcagactgatgagggaaaataataacattaccatgagagtttggcttggattatctcaacattctgttgactgtccttcatctacttggattcagttccaagacagttgttacatttttctccaagaagccatcaaagtagaaagcatagaggatgtcagaaatcagtgtactgaccatggagcggacatgataagcatacataatgaagaagaaaatgcttttatactggatactttgaaaaagcaatggaaaggcccagatgatatcctactaggcatgttttatgacacagatgatgcgagtttcaagtggtttgataattcaaatatgacatttgataagtggacagaccaagatgatgatgaggatttagttgacacctgtgcttttctgcacatcaagacaggtgaatggaaaaaaggaaattgtgaagtttcttctgtggaaggaacactatgcaaaacagctatcccatacaaaaggaaatatttatcagataaccacattttaatatcagcattggtgattgctagcacggtaattttgacagttttgggagcaatcatttggttcctgtacaaaaaacattctgattctcgtttcaccacagttttttcaaccgcaccccaatcaccttataatgaagactgtgttttggtagttggagaagaaaatgaatatcctgttcaatttgactaa

SEQ ID NO: 32 - DNA, 5713 bp, Homo sapiens
  source 1..5713: mol_type = genomic DNA
gataaggcacatgcgaaatgcaaagccttcagtagtgacctaatcagcattcattctctagcagatgtggaggtggttgtcacaaaactccataatgaggatatcaaagaagaagtgtggataggccttaagaacataaacataccaactttatttcagtggtcagatggtactgaagttactctaacatattgggatgagaatgagccaaatgttccctacaataagacgcccaactgtgtttcctacttaggagagctaggtcagtggaaagtccaatcatgtgaggagaaactaaaatatgtatgcaagagaaagggagaaaaactgaatgacgcaagttctgataagatgtgtcctccagatgagggctggaagagacatggagaaacctgttacaagatttatgaggatgaggtcccttttggaacaaactgcaatctgactatcactagcagatttgagcaagaatacctaaatgatttgatgaaaaagtatgataaatctctaagaaaatacttctggactggcctgagagatgtagattcttgtggagagtataactgggcaactgttggtggaagaaggcgggctgtaaccttttccaactggaattttcttgagccagcttccccgggcggctgcgtggctatgtctactggaaagtctgttggaaagtgggaggtgaaggactgcagaagcttcaaagcactttcaatttgcaagaaaatgagtggaccccttgggcctgaagaagcatcccctaagcctgatgacccctgtcctgaaggctggcagagtttccccgcaagtctttcttgttataaggtattccatgcagaaagaattgtaagaaagaggaactgggaagaagctgaacgattctgccaagcccttggagcacacctttctagcttcagccatgtggatgaaataaaggaatttcttcactttttaacggaccagttcagtggccagcattggctgtggattggtttgaataaaaggagcccagatttacaaggatcctggcaatggagtgatcgtacaccagtgtctactattatcatgccaaatgagtttcagcaggattatgacatcagagactgtgctgctgtcaaggtatttcataggccatggcgaagaggctggcatttctatgatgatagagaatttatttatttgaggccttttgcttgtgatacaaaacttgaatgggtgtgccaaattccaaaaggccgtactccaaaaacaccagactggtacaatccagagcgtgctggaattcatggacctccacttataattgaaggaagtgaatattggtttgttgctgatcttcacctaaactatgaagaagccgtcctgtactgtgccagcaatcacagctttcttgcaactataacatcttttgtgggactaaaagccatcaaaaacaaaatagcaaatatatctggtgatggacagaagtggtggataagaattagcgagtggccaatagatgatcattttacatactcacgatatccatggcaccgctttcctgtgacatttggagaggaatgcttgtacatgtctgccaagacttggcttatcgacttaggtaaaccaacagactgtagtaccaagttgcccttcatctgtgaaaaatataatgtttcttcgttagagaaatacagcccagattctgcagctaaagtgcaatgttctgagcaatggattccttttcagaataagtgttttctaaagatcaaacccgtgtctctcacattttctcaagcaagcgatacctgtcactcctatggtggcacccttccttcagtgttgagccagattgaacaagactttattacatccttgcttccggatatggaagctactttatggattggtttgcgctggactgcctatgaaaagataaacaaatggacagataacagagagctgacgtacagtaactttcacccattattggttagtgggaggctgagaataccagaaaatttttttgaggaagagtctcgctaccactgtgccctaatactcaacctccaaaaatcaccgtttactgggacgtggaattttacatcctgcagtgaacgccactttgtgtctctctgtcagaaatattcagaagttaaaagcagacagacgttgcagaatgcttcagaaactgtaaagtatctaaataatctgtacaaaataatcccaaagactctgacttggcacagtgctaaaagggagtgtctgaaaagtaacatgcagctggtgagcatcacggacccttaccagcaggcattcctcagtgtgcaggcgctccttcacaactcttccttatggatcggactcttcagtcaagatgatgaactcaactttggttggtcagatgggaaacgtcttcattttagtcgctgggctgaaactaatgggcaactcgaagactgtgtagtattagacactgatggattctggaaaacagttgattgcaatgacaatcaaccaggtgctatttgctactattcaggaaatgagactgaaaaagaggtcaaaccagttgacagtgttaaatgtccatctcctgttctaaatactccgtggataccatttcagaactgttgctacaatttcataataacaaagaataggcatatggcaacaacacaggatgaagttcatactaaatgccagaaactgaatccaaaatcacatattctgagtattcgagatgaaaaggagaataactttgttcttgagcaactgctgtacttcaattatatggcttcatgggtcatgttaggaataacttatagaaataattctcttatgtggtttgataagaccccactgtcatatacacattggagagcaggaagaccaactataaaaaatgagaagtttttggctggtttaagtactgacggcttctgggatattcaaacctttaaagttattgaagaagcagtttattttcaccagcacagcattcttgcttgtaaaattgaaatggttgactacaaagaagaatataatactacactgccacagtttatgccatatgaagatggtatttacagtgttattcaaaaaaaggtaacatggtatgaagcattaaacatgtgttctcaaagtggaggtcacttggcaagcgttcacaaccaaaatggccagctctttctggaagatattgtaaaacgtgatggatttccactatgggttgggctctcaagtcatgatggaagtgaatcaagttttgaatggtctgatggtagtacatttgactatatcccatggaaaggccaaacatctcctggaaattgtgttctcttggatccaaaaggaacttggaaacatgaaaaatgcaactctgttaaggatggtgctatttgttataaacctacaaaatctaaaaagctgtcccgtcttacatattcatcaagatgtccagcagcaaaagagaatgggtcacggtggatccagtacaagggtcactgttacaagtctgatcaggcattgcacagtttttcagaggccaaaaaattgtgttcaaaacatgatcactctgcaactatcgtttccataaaagatgaagatgagaataaatttgtgagcagactgatgagggaaaataataacattaccatgagagtttggcttggattatctcaacattctgttgaccagtcttggagttggttagatggatcagaagtgacatttgtcaaatgggaaaataaaagtaagagtggtgttggaagatgtagcatgttgatagcttcaaatgaaacttggaaaaaagttgaatgtgaacatggttttggaagagttgtctgcaaagtgcctctgggccctgattacacagcaatagctatcatagttgccacactaagtatcttagttctcatgggcggactgatttggttcctcttccaaaggcaccgtttgcacctggcgggtttctcatcagttcgatatgcacaaggagtgaatgaagatgagattatgcttccttctttccatgactaaattcttctaaaagttttctaatttgcactaatgtgttatgagaaattagtcacttaaaatgtcccagtgtcagtatttactctgctccaaagtagaactcttaaatactttttcagttgtttagatcttaggcatgtgctggtatccacagttaattccctgctaaatgccatgtttatcaccctaattaatagaatggaggggactccaaagctggaactgaagtccaaattgtttgtacagtaatatgtttaatgttcattttctctgtatgaatgtgattggtaactaggatatgtatattttaatagaatttttaacaaaacttcttagaaaattaaaataggcatattactaggtgacatgtctactttttaatttttaagagcatccggccaaatgcaaaattagtacctcaaagtaaaaattgaactgtaaactctatcagcattgtttcaaaatagtcatttttagcactggggaaaaataaacaataagacatgcttactttttaatttttatttttttgagactgagtctctctctgttgcccaggctggagtacaatggcgtgatctcggctcactgcaaatctccgcctcccaggttcaagcgattctcctgcctcagcctcctgagtagctgggattacaggcaactgccaccatgcccggctaatttttgtatttttagtagagatggggtttcaccatgttggccaggctggtctcgaactcgtgaccgcaggtgatcctcccgcctcggcctcccaaagtgctgggattacaggcatgagccaccgcgcctggcctctgcttactttttatatagcaaaatgattcctcttggcaagatgtttcttatattattccaaagttatttcataccattattatgtaaatatgaagagtttttttctgtttataattgtttataaaacaatgacttttaaagatttagtgcttaacattttcccaagtgtgggaacattatttttagattgagtaggtaccttgtagcagtgtgctttgcattttctgatgtattacatgactgtttcttttgtaaagagaatcaactaggtatttaagactgataattttacaatttatatgcttcacatagcatgtcaacttttgactaagaattttgttttacttttttaacatgtgttaaacagagaaagggtccatgaaggaaagtgtatgagttgcatttgtaaaaatgagactttttcagtggaactctaaaccttgtgatgactactaacaaatgtaaaattatgagtgattaagaaaacattgctttgtggttatcactttaagttttgacacctagattatagtcttagtaatagcatccactggaaaaggtgaaaatgttttattcagcatttaacttacatttgtactttagagtatttttgtataaaatccatagatttattttacatttagagtatttacactatgataaagttgtaaataattttctaagacagtttttatatagtctacagttgtcctgatttcttattgaatttgttagactagttctcttgtcctgtgatctgtgtacaattttagtcactaagactttcctccaagaactaagccaacttgatgtgaaaagcacagctgtatataatggtgatgtcataataaagttgttttatcttttaagtaaaagt

SEQ ID NO: 33 - DNA, 6928 bp, Homo sapiens
  source 1..6928: mol_type = genomic DNA
ggcgggagcgcgtgcgcccgaggacccggccggaaggcttgcgccagctcaggatgaggacaggctgggcgacccctcgccgcccggcggggctcctcatgctgctcttctggttcttcgatctcgcggagccctctggccgcgcagctaatgaccccttcaccatcgtccatggaaatacgggcaagtgcatcaagccagtgtatggctggatagtagcagacgactgtgatgaaactgaggacaagttatggaagtgggtgtcccagcatcggctctttcatttgcactcccaaaagtgccttggcctcgatattaccaaatcggtaaatgagctgagaatgttcagctgtgactccagtgccatgctgtggtggaaatgtgagcaccactctctgtacggagctgcccggtaccggctggctctgaaggatggacatggcacagcaatctcaaatgcatctgatgtctggaagaaaggaggctcagaggaaagcctttgtgaccagccttatcatgagatctataccagagatgggaactcttatgggagaccttgtgaatttccattcttaattgatgggacctggcatcatgattgcattcttgatgaagatcatagtgggccatggtgtgccaccaccttaaattatgaatatgaccgaaagtggggcatctgcttaaagcctgaaaacggttgtgaagataattgggaaaagaacgagcagtttggaagttgctaccaatttaatactcagacggctctttcttggaaagaagcttatgtttcatgtcagaatcaaggagctgatttactgagcatcaacagtgctgctgaattaacttaccttaaagaaaaagaaggcattgctaagattttctggattggtttaaatcagctatactctgctagaggctgggaatggtcagaccacaaaccattaaactttctcaactgggatccagacaggcccagtgcacctactataggtggctccagctgtgcaagaatggatgctgagtctggtctgtggcagagcttttcctgtgaagctcaactgccctatgtctgcaggaaaccattaaataatacagtggagttaacagatgtctggacatactcagatacccgctgtgatgcaggctggctgccaaataatggattttgctatctgctggtaaatgaaagtaattcctgggataaggcacatgcgaaatgcaaagccttcagtagtgacctaatcagcattcattctctagcagatgtggaggtggttgtcacaaaactccataatgaggatatcaaagaagaagtgtggataggccttaagaacataaacataccaactttatttcagtggtcagatggtactgaagttactctaacatattgggatgagaatgagccaaatgttccctacaataagacgcccaactgtgtttcctacttaggagagctaggtcagtggaaagtccaatcatgtgaggagaaactaaaatatgtatgcaagagaaagggagaaaaactgaatgacgcaagttctgataagatgtgtcctccagatgagggctggaagagacatggagaaacctgttacaagatttatgaggatgaggtcccttttggaacaaactgcaatctgactatcactagcagatttgagcaagaatacctaaatgatttgatgaaaaagtatgataaatctctaagaaaatacttctggactggcctgagagatgtagattcttgtggagagtataactgggcaactgttggtggaagaaggcgggctgtaaccttttccaactggaattttcttgagccagcttccccgggcggctgcgtggctatgtctactggaaagtctgttggaaagtgggaggtgaaggactgcagaagcttcaaagcactttcaatttgcaagaaaatgagtggaccccttgggcctgaagaagcatcccctaagcctgatgacccctgtcctgaaggctggcagagtttccccgcaagtctttcttgttataaggtattccatgcagaaagaattgtaagaaagaggaactgggaagaagctgaacgattctgccaagcccttggagcacacctttctagcttcagccatgtggatgaaataaaggaatttcttcactttttaacggaccagttcagtggccagcattggctgtggattggtttgaataaaaggagcccagatttacaaggatcctggcaatggagtgatcgtacaccagtgtctactattatcatgccaaatgagtttcagcaggattatgacatcagagactgtgctgctgtcaaggtatttcataggccatggcgaagaggctggcatttctatgatgatagagaatttatttatttgaggccttttgcttgtgatacaaaacttgaatgggtgtgccaaattccaaaaggccgtactccaaaaacaccagactggtacaatccagaccgtgctggaattcatggacctccacttataattgaaggaagtgaatattggtttgttgctgatcttcacctaaactatgaagaagccgtcctgtactgtgccagcaatcacagctttcttgcgactataacatcttttgtgggactaaaagccatcaaaaacaaaatagcaaatatatctggtgatggacagaagtggtggataagaattagcgagtggccaatagatgatcattttacatactcacgatatccatggcaccgctttcctgtgacatttggagaggaatgcttgtacatgtctgccaagacttggcttatcgacttaggtaaaccaacagactgtagtaccaagttgcccttcatctgtgaaaaatataatgtttcttcgttagagaaatacagcccagattctgcagctaaagtgcaatgttctgagcaatggattccttttcagaataagtgttttctaaagatcaaacccgtgtctctcacattttctcaagcaagcgatacctgtcactcctatggtggcacccttccttcagtgttgagccagattgaacaagactttattacatccttgcttccggatatggaagctactttatggattggtttgcgctggactgcctatgaaaagataaacaaatggacagataacagagagctgacgtacagtaactttcacccattattggttagtgggaggctgagaataccagaaaatttttttgaggaagagtctcgctaccactgtgccctaatactcaacctccaaaaatcaccgtttactgggacgtggaattttacatcctgcagtgaacgccactttgtgtctctctgtcagaaatattcagaagttaaaagcagacagacgttgcagaatgcttcagaaactgtaaagtatctaaataatctgtacaaaataatcccaaagactctgacttggcacagtgctaaaagggagtgtctgaaaagtaacatgcagctggtgagcatcacggacccttaccagcaggcattcctcagtgtgcaggcgctccttcacaactcttccttatggatcggactcttcagtcaagatgatgaactcaactttggttggtcagatgggaaacgtcttcattttagtcgctgggctgaaactaatgggcaactcgaagactgtgtagtattagacactgatggattctggaaaacagttgattgcaatgacaatcaaccaggtgctatttgctactattcaggaaatgagactgaaaaagaggtcaaaccagttgacagtgttaaatgtccatctcctgttctaaatactccgtggataccatttcagaactgttgctacaatttcataataacaaagaataggcatatggcaacaacacaggatgaagttcatactaaatgccagaaactgaatccaaaatcacatattctgagtattcgagatgaaaaggagaataactttgttcttgagcaactgctgtacttcaattatatggcttcatgggtcatgttaggaataacttatagaaataattctcttatgtggtttgataagaccccactgtcatatacacattggagagcaggaagaccaactataaaaaatgagaagtttttggctggtttaagtactgacggcttctgggatattcaaacctttaaagttattgaagaagcagtttattttcaccagcacagcattcttgcttgtaaaattgaaatggttgactacaaagaagaacataatactacactgccacagtttatgccatatgaagatggtatttacagtgttattcaaaaaaaggtaacatggtatgaagcattaaacatgtgttctcaaagtggaggtcacttggcaagcgttcacaaccaaaatggccagctctttctggaagatattgtaaaacgtgatggatttccactatgggttgggctctcaagtcatgatggaagtgaatcaagttttgaatggtctgatggtagtacatttgactatatcccatggaaaggccaaacatctcctggaaattgtgttctcttggatccaaaaggaacttggaaacatgaaaaatgcaactctgttaaggatggtgctatttgttataaacctacaaaatctaaaaagctgtcccgtcttacatattcatcaagatgtccagcagcaaaagagaatgggtcacggtggatccagtacaagggtcactgttacaagtctgatcaggcattgcacagtttttcagaggccaaaaaattgtgttcaaaacatgatcactctgcaactatcgtttccataaaagatgaagatgagaataaatttgtgagcagactgatgagggaaaataataacattaccatgagagtttggcttggattatctcaacattctgttgaccagtcttggagttggttagatggatcagaagtgacatttgtcaaatgggaaaataaaagtaagagtggtgttggaagatgtagcatgttgatagcttcaaatgaaacttggaaaaaagttgaatgtgaacatggttttggaagagttgtctgcaaagtgcctctgggccctgattacacagcaatagctatcatagttgccacactaagtatcttagttctcatgggcggactgatttggttcctcttccaaaggcaccgtttgcacctggcgggtttctcatcagttcgatatgcacaaggagtgaatgaagatgagattatgcttccttctttccatgactaaattcttctaaaagttttctaatttgcactaatgtggttatggagaaattagtcacttaaaatgtcccagtgtcagtatttactctgctccaaagtagaactcttaaatactttttcagttgtttagatcttaggcatgtgctggtatccacagttaattccctgctaaatgccatgtttatcaccctaattaatagaatggaggggactccaaagctggaactgaagtccaaattgtttgtacagtaatatgtttaatgttcattttctctgtatgaatgtgattggtaactaggatatgtatattttaatagaatttttaacaaaacttcttagaaaattaaaataggcatattactaggtgacatgtctactttttaatttttaagagcatccggccaaatgcaaaattagtacctcaaagtaaaaattgaactgtaaactctatcagcattgtttcaaaatagtcatttttagcactggggaaaaataaacaataagacatgcttactttttaatttttatttttttgagactgagtctctctctgttgcccaggctggagtacaatggcgtgatctcggctcactgcaaatctccgcctcccaggttcaagcgattctcctgcctcagcctcctgagtagctgggattacaggcaactgccaccatgcccggctaatttttgtatttttagtagagatggggtttcaccatgttggccaggctggtctcgaactcgtgaccgcagtgatcctcccgcctcggcctcccaaagtgctgggattacaggcatgagccaccgcgcctggcctctgcttactttttatatagcaaaatgattccccttggcaagatgtttcttatattattccaaagttatttcataccattattatgtaaatatgaagagtttttttctgtttataattgtttataaaacaatgacttttaaagatttagtgcttaacattttcccaagtgtgggaacattatttttagattgagtaggtaccttgtagcagtgtgctttgcattttctgatgtattacatgactgtttcttttgtaaagagaatcaactaggtatttaagactgataattttacaatttatatgcttcacatagcatgtcaacttttgactaagaattttgttttacttttttaacatgtgttaaacagagaaagggtccatgaaggaaagtgtatgagttgcatttgtaaaaatgagactttttcagtggaactctaaaccttgtgatgactactaacaaatgtaaaattatgagtgattaagaaaacattgctttgtggttatcactttaagttttgacacctagattatagtcttagtaatagcatccactggaaaaggtgaaaatgttttattcagcatttaacttacatttgtactttagagtatttttgtataaaatccatagatttattttacatttagagtatttacactatgataaagttgtaaataattttctaagacagtttttatatagtctacagttgtcctgatttcttattgaatttgttagactagttctcttgtcttgtgatctgtgtacaattttagtcactaagactttcctccaagaactaagccaacttgatgtgaaaagcacggctgtatataatggtgatgtcataataaagttgttttatcttttaagtaaaaaaaaaaaaaaaaaaaaa

SEQ ID NO: 34 - DNA, 5169 bp, Homo sapiens
  source 1..5169: mol_type = genomic DNA
atgaggacaggctgggcgacccctcgccgcccggcggggctcctcatgctgctcttctggttcttcgatctcgcggagccctctggccgcgcagctaatgaccccttcaccatcgtccatggaaatacgggcaagtgcatcaagccagtgtatggctggatagtagcagacgactgtgatgaaactgaggacaagttatggaagtgggtgtcccagcatcggctctttcatttgcactcccaaaagtgccttggcctcgatattaccaaatcggtaaatgagctgagaatgttcagctgtgactccagtgccatgctgtggtggaaatgtgagcaccactctctgtacggagctgcccggtaccggctggctctgaaggatggacatggcacagcaatctcaaatgcatctgatgtctggaagaaaggaggctcagaggaaagcctttgtgaccagccttatcatgagatctataccagagatgggaactcttatgggagaccttgtgaatttccattcttaattgatgggacctggcatcatgattgcattcttgatgaagatcatagtgggccatggtgtgccaccaccttaaattatgaatatgaccgaaagtggggcatctgcttaaagcctgaaaacggttgtgaagataattgggaaaagaacgagcagtttggaagttgctaccaatttaatactcagacggctctttcttggaaagaagcttatgtttcatgtcagaatcaaggagctgatttactgagcatcaacagtgctgctgaattaacttaccttaaagataaagaaggcattgctaagattttctggattggtttaaatcagctatactctgctagaggctgggaatggtcagaccacaaaccattaaactttctcaactgggatccagacaggcccagtgcacctactataggtggctccagctgtgcaagaatggatgctgagtctggtctgtggcagagcttttcctgtgaagctcaactgccctatgtctgcaggaaaccattaaataatacagtggagttaacagatgtctggacatactcagatacccgctgtgatgcaggctggctgccaaataatggattttgctatctgctggtaaatgaaagtaattcctgggataaggcacatgcgaaatgcaaagccttcagtagtgacctaatcagcattcattctctagcagatgtggaggtggttgtcacaaaactccataatgaggatatcaaagaagaagtgtggataggccttaagaacataaacataccaactttatttcagtggtcagatggtactgaagttactctaacatattgggatgagaatgagccaaatgttccctacaataagacgcccaactgtgtttcctacttaggagagctaggtcagtggaaagtccaatcatgtgaggagaaactaaaatatgtatgcaagagaaagggagaaaaactgaatgacgcaagttctgataagatgtgtcctccagatgagggctggaagagacatggagaaacctgttacaagatttatgaggatgaggtcccttttggaacaaactgcaatctgactatcactagcagatttgagcaagaatacctaaatgatttgatgaaaaagtatgataaatctctaagaaaatacttctggactggcctgagagatgtagattcttgtggagagtataactgggcaactgttggtggaagaaggcgggctgtaaccttttccaactggaattttcttgagccagcttccccgggcggctgcgttgctatgtcaactggaaagtctgttggaaagtgggaggtgaaggactgcagaagcttcaaagcactttcaatttgcaagaaaatgagtggaccccttgggcctgaagaagcatcccctaagcctgatgacccctgtcctgaaggctggcagagtttccccgcaagtctttcttgttataaggtatttcatgcagaaagaattgtaagaaagaggaactgggaagaagctgaacgattctgccaagcccttggagcacacctttctagcttcagccatgtggatgaaataaaggaatttcttcactttttaacggaccagttcagtggccagcattggctgtggattggtttgaataaaaggagcccagatttacaaggatcttggcaatggagtgatcgtacaccagtgtctactattatcatgccaaatgagtttcagcaggattatgacatcagagactgtgctgctgtcaaggtatttcataggccatggcgaagaggctggcatttctatgatgatagagaatttatttatttgaggccttttgcttgtgatacaaaacttgaatgggtgtgccaaattccaaaaggccgtactccaaaaacaccagactggtacaatccagagcgtgctggaattcatggacctccacttataattgaaggaagtgaatattggtttgttgctgatcttcacctaaactatgaagaagccgtcctgtactgtgccagcaatcacagctttcttgcaactataacatcttttgtgggactaaaagccatcaaaaacaaaatagcaaatatatctggtgatggacagaagtggtggataagaattagcgagtggccaatagatgatcattttacatactcacgatatccatggcaccgctttcctgtgacatttggagaggaatgcttgtacatgtctgccaagacttggcttatcgacttaggtaaaccaacagactgtagtaccaagttgcccttcatctgtgaaaaatataatgtttcttcgttagagaaatacagcccagattctgcagctaaagtgcaatgttctgagcaatggattccttttcagaataagtgttttctaaagatcaaacccgtgtctctcacattttctcaagcaagcgatacctgtcactcctatggtggcacccttccttcagtgttgagccagattgaacaagactttattacatccttgcttccggatatggaagctactttatggattggtttgcgctggactgcctatgaaaagataaacaaatggacagataacagagagctgacgtacagtaactttcacccattattggttagtgggaggctgagaataccagaaaatttttttgaggaagagtctcgctaccactgtgccctaatactcaacctccaaaaatcaccgtttactgggacgtggaattttacatcctgcagtgaacgccactttgtgtctctctgtcagaaatattcagaagttaaaagcagacagacgttgcagaatgcttcagaaactgtaaagtatctaaataatctgtacaaaataatcccaaagactctgacttggcacagtgctaaaagggagtgtctgaaaagtaacatgcagctggtgagcatcacggacccttaccagcaggcattcctcagtgtgcaggcgctccttcacaactcttccttatggatcggactcttcagtcaagatgatgaactcaactttggttggtcagatgggaaacgtcttcattttagtcgctgggctgaaactaatgggcaactcgaagactgtgtagtattagacactgatggattctggaaaacagttgattgcaatgacaatcaaccaggtgctatttgctactattcaggaaatgagactgaaaaagaggtcaaaccagttgacagtgttaaatgtccatctcctgttctaaatactccgtggataccatttcagaactgttgctacaatttcataataacaaagaataggcatatggcaacaacacaggatgaagttcatactaaatgccagaaactgaatccaaaatcacatattctgagtattcgagatgaaaaggagaataactttgttcttgagcaactgctgtacttcaattatatggcttcatgggtcatgttaggaataacttatagaaataagtctcttatgtggtttgataagaccccactgtcatatacacattggagagcaggaagaccaactataaaaaatgagaagtttttggctggtttaagtactgacggcttctgggatattcaaacctttaaagttattgaagaagcagtttattttcaccagcacagcattcttgcttgtaaaattgaaatggttgactacaaagaagaatataatactacactgccacagtttatgccatatgaagatggtatttacagtgttattcaaaaaaaggtaacatggtatgaagcattaaacatgtgttctcaaagtggaggtcacttggcaagcgttcacaaccaaaatggccagctctttctggaagatattgtaaaacgtgatggatttccactatgggttgggctctcaagtcatgatggaagtgaatcaagttttgaatggtctgatggtagtacatttgactatatcccatggaaaggccaaacatctcctggaaattgtgttctcttggatccaaaaggaacttggaaacatgaaaaatgcaactctgttaaggatggtgctatttgttataaacctacaaaatctaaaaagctgtcccgtcttacatattcatcaagatgtccagcagcaaaagagaatgggtcacggtggatccagtacaagggtcactgttacaagtctgatcaggcattgcacagtttttcagaggccaaaaaattgtgttcaaaacatgatcactctgcaactatcgtttccataaaagatgaagatgagaataaatttgtgagcagactgatgagggaaaataataacattaccatgagagtttggcttggattatctcaacattctgttgaccagtcttggagttggttagatggatcagaagtgacatttgtcaaatgggaaaataaaagtaagagtggtgttggaagatgtagcatgttgatagcttcaaatgaaacttggaaaaaagttgaatgtgaacatggttttggaagagttgtctgcaaagtgcctctgggccctgattacacagcaatagctatcatagttgccacactaagtatcttagttctcatgggcggactgatttggttcctcttccaaaggcaccgtttgcacctggcgggtttctcatcagttcgatatgcacaaggagtgaatgaagatgagattatgcttccttctttccatgactaa

SEQ ID NO: 35 - DNA, 6886 bp, Homo sapiens
  source 1..6886: mol_type = genomic DNA
ccggccggaaggcttgcgccagctcaggatgaggacaggctgggcgacccctcgccgcccggcggggctcctcatgctgctcttctggttcttcgatctcgcggagccctctggccgcgcagctaatgaccccttcaccatcgtccatggaaatacgggcaagtgcatcaagccagtgtatggctggatagtagcagacgactgtgatgaaactgaggacaagttatggaagtgggtgtcccagcatcggctctttcatttgcactcccaaaagtgccttggcctcgatattaccaaatcggtaaatgagctgagaatgttcagctgtgactccagtgccatgctgtggtggaaatgtgagcaccactctctgtacggagctgcccggtaccggctggctctgaaggatggacatggcacagcaatctcaaatgcatctgatgtctggaagaaaggaggctcagaggaaagcctttgtgaccagccttatcatgagatctataccagagatgggaactcttatgggagaccttgtgaatttccattcttaattgatgggacctggcatcatgattgcattcttgatgaagatcatagtgggccatggtgtgccaccaccttaaattatgaatatgaccgaaagtggggcatctgcttaaagcctgaaaacggttgtgaagataattgggaaaagaacgagcagtttggaagttgctaccaatttaatactcagacggctctttcttggaaagaagcttatgtttcatgtcagaatcaaggagctgatttactgagcatcaacagtgctgctgaattaacttaccttaaagaaaaagaaggcattgctaagattttctggattggtttaaatcagctatactctgctagaggctgggaatggtcagaccacaaaccattaaactttctcaactgggatccagacaggcccagtgcacctactataggtggctccagctgtgcaagaatggatgctgagtctggtctgtggcagagcttttcctgtgaagctcaactgccctatgtctgcaggaaaccattaaataatacagtggagttaacagatgtctggacatactcagatacccgctgtgatgcaggctggctgccaaataatggattttgctatctgctggtaaatgaaagtaattcctgggataaggcacatgcgaaatgcaaagccttcagtagtgacctaatcagcattcattctctagcagatgtggaggtggttgtcacaaaactccataatgaggatatcaaagaagaagtgtggataggccttaagaacataaacataccaactttatttcagtggtcagatggtactgaagttactctaacatattgggatgagaatgagccaaatgttccctacaataagacgcccaactgtgtttcctacttaggagagctaggtcagtggaaagtccaatcatgtgaggagaaactaaaatatgtatgcaagagaaagggagaaaaactgaatgacgcaagttctgataagatgtgtcctccagatgagggctggaagagacatggagaaacctgttacaagatttatgaggatgaggtcccttttggaacaaactgcaatctgactatcactagcagatttgagcaagaatacctaaatgatttgatgaaaaagtatgataaatctctaagaaaatacttctggactggcctgagagatgtagattcttgtggagagtataactgggcaactgttggtggaagaaggcgggctgtaaccttttccaactggaattttcttgagccagcttccccgggcggctgcgtggctatgtctactggaaagtctgttggaaagtgggaggtgaaggactgcagaagcttcaaagcactttcaatttgcaagaaaatgagtggaccccttgggcctgaagaagcatcccctaagcctgatgacccctgtcctgaaggctggcagagtttccccgcaagtctttcttgttataaggtattccatgcagaaagaattgtaagaaagaggaactgggaagaagctgaacgattctgccaagcccttggagcacacctttctagcttcagccatgtggatgaaataaaggaatttcttcactttttaacggaccagttcagtggccagcattggctgtggattggtttgaataaaaggagcccagatttacaaggatcctggcaatggagtgatcgtacaccagtgtctactattatcatgccaaatgagtttcagcaggattatgacatcagagactgtgctgctgtcaaggtatttcataggccatggcgaagaggctggcatttctatgatgatagagaatttatttatttgaggccttttgcttgtgatacaaaacttgaatgggtgtgccaaattccaaaaggccgtactccaaaaacaccagactggtacaatccagaccgtgctggaattcatggacctccacttataattgaaggaagtgaatattggtttgttgctgatcttcacctaaactatgaagaagccgtcctgtactgtgccagcaatcacagctttcttgcaactataacatcttttgtgggactaaaagccatcaaaaacaaaatagcaaatatatctggtgatggacagaagtggtggataagaattagcgagtggccaatagatgatcattttacatactcacgatatccatggcaccgctttcctgtgacatttggagaggaatgcttgtacatgtctgccaagacttggcttatcgacttaggtaaaccaacagactgtagtaccaagttgcccttcatctgtgaaaaatataatgtttcttcgttagagaaatacagcccagattctgcagctaaagtgcaatgttctgagcaatggattccttttcagaataagtgttttctaaagatcaaacccgtgtctctcacattttctcaagcaagcgatacctgtcactcctatggtggcacccttccttcagtgttgagccagattgaacaagactttattacatccttgcttccggatatggaagctactttatggattggtttgcgctggactgcctatgaaaagataaacaaatggacagataacagagagctgacgtacagtaactttcacccattattggttagtgggaggctgagaataccagaaaatttttttgaggaagagtctcgctaccactgtgccctaatactcaacctccaaaaatcaccgtttactgggacgtggaattttacatcctgcagtgaacgccactttgtgtctctctgtcagaaatattcagaagttaaaagcagacagacgttgcagaatgcttcagaaactgtaaagtatctaaataatctgtacaaaataatcccaaagactctgacttggcacagtgctaaaagggagtgtctgaaaagtaacatgcagctggtgagcatcacggacccttaccagcaggcattcctcagtgtgcaggcgctccttcacaactcttccttatggatcggactcttcagtcaagatgatgaactcaactttggttggtcagatgggaaacgtcttcattttagtcgctgggctgaaactaatgggcaactcgaagactgtgtagtattagacactgatggattctggaaaacagttgattgcaatgacaatcaaccaggtgctatttgctactattcaggaaatgagactgaaaaagaggtcaaaccagttgacagtgttaaatgtccatctcctgttctaaatactccgtggataccatttcagaactgttgctacaatttcataataacaaagaataggcatatggcaacaacacaggatgaagttcatactaaatgccagaaactgaatccaaaatcacatattctgagtattcgagatgaaaaggagaataactttgttcttgagcaactgctgtacttcaattatatggcttcatgggtcatgttaggaataacttatagaaataagtctcttatgtggtttgataagaccccactgtcatatacacattggagagcaggaagaccaactataaaaaatgagaagtttttggctggtttaagtactgacggcttctgggatattcaaacctttaaagttattgaagaagcagtttattttcaccagcacagcattcttgcttgtaaaattgaaatggttgactacaaagaagaatataatactacactgccacagtttatgccatatgaagatggtatttacagtgttattcaaaaaaaggtaacatggtatgaagcattaaacatgtgttctcaaagtggaggtcacttggcaagcgttcacaaccaaaatggccagctctttctggaagatattgtaaaacgtgatggatttccactatgggttgggctctcaagtcatgatggaagtgaatcaagttttgaatggtctgatggtagtacatttgactatatcccatggaaaggccaaacatctcctggaaattgtgttctcttggatccaaaaggaacttggaaacatgaaaaatgcaactctgttaaggatggtgctatttgttataaacctacaaaatctaaaaagctgtcccgtcttacatattcatcaagatgtccagcagcaaaagagaatgggtcacggtggatccagtacaagggtcactgttacaagtctgatcaggcattgcacagtttttcagaggccaaaaaattgtgttcaaaacatgatcactctgcaactatcgtttccataaaagatgaagatgagaataaatttgtgagcagactgatgagggaaaataataacattaccatgagagtttggcttggattatctcaacattctgttgaccagtcttggagttggttagatggatcagaagtgacatttgtcaaatgggaaaataaaagtaagagtggtgttggaagatgtagcatgttgatagcttcaaatgaaacttggaaaaaagttgaatgtgaacatggttttggaagagttgtctgcaaagtgcctctgggccctgattacacagcaatagctatcatagttgccacactaagtatcttagttctcatgggcggactgatttggttcctcttccaaaggcaccgtttgcacctggcgggtttctcatcagttcgatatgcacaaggagtgaatgaagatgagattatgcttccttctttccatgactaaattcttctaaaagttttctaatttgcactaatgtgttatgagaaattagtcacttaaaatgtcccagtgtcagtatttactctgctccaaagtagaactcttaaatactttttcagttgtttagatcttaggcatgtgctggtatccacagttaattccctgctaaatgccatgtttatcaccctaattaatagaatggaggggactccaaagctggaactgaagtccaaattgtttgtacagtaatatgtttaatgttcattttctctgtatgaatgtgattggtaactaggatatgtatattttaatagaatttttaacaaaacttcttagaaaattaaaataggcatattactaggtgacatgtctactttttaatttttaagagcatccggccaaatgcaaaattagtacctcaaagtaaaaattgaactgtaaactctatcagcattgtttcaaaatagtcatttttagcactggggaaaaataaacaataagacatgcttactttttaatttttatttttttgagactgagtctctctctgttgcccaggctggagtacaatggcgtgatctcggctcactgcaaatctccgcctcccaggttcaagcgattctcctgcctcagcctcctgagtagctgggattacaggcaactgccaccatgcccggctaatttttgtatttttagtagagatggggtttcaccatgttggccaggctggtctcgaactcgtgaccgcaggtgatcctcccgcctcggcctcccaaagtgctgggattacaggcatgagccaccgcgcctggcctctgcttactttttatatagcaaaatgattcctcttggcaagatgtttcttatattattccaaagttatttcataccattattatgtaaatatgaagagtttttttctgtttataattgtttataaaacaatgacttttaaagatttagtgcttaacattttcccaagtgtgggaacattatttttagattgagtaggtaccttgtagcagtgtgctttgcattttctgatgtattacatgactgtttcttttgtaaagagaatcaactaggtatttaagactgataattttacaatttatatgcttcacatagcatgtcaacttttgactaagaattttgttttacttttttaacatgtgttaaacagagaaagggtccatgaaggaaagtgtatgagttgcatttgtaaaaatgagactttttcagtggaactctaaaccttgtgatgactactaacaaatgtaaaattatgagtgattaagaaaacattgctttgtggttatcactttaagttttgacacctagattatagtcttagtaatagcatccactggaaaaggtgaaaatgttttattcggcatttaacttacatttgtactttatttttgtataaaatccatagatttattttacatttagagtatttacactatgataaagttgtaaataattttctaagacagtttttatatagtctacagttgtcctgatttcttattgaatttgttagactagttctcttgtcctgtgatctgtgtacaattttagtcactaagactttcctccaagaactaagccaacttgatgtgaaaagcacagctgtatataatggtgatgtcataataaagttgttttatcttttaagtaaaagtaaaa

SEQ ID NO: 36 - DNA, 6932 bp, Homo sapiens
  source 1..6932: mol_type = genomic DNA
aggccgcgctcagcaggcggggcgggagccgcgtgcgcccgaggacccggccggaaggcttgcgccagctcaggatgaggacaggctgggcgacccctcgccgcccggcggggctcctcatgctgctcttctggttcttcgatctcgcggagccctctggccgcgcagctaatgaccccttcaccatcgtccatggaaatacgggcaagtgcatcaagccagtgtatggctggatagtagcagacgactgtgatgaaactgaggacaagttatggaagtgggtgtcccagcatcggctctttcatttgcactcccaaaagtgccttggcctcgatattaccaaatcggtaaatgagctgagaatgttcagctgtgactccagtgccatgctgtggtggaaatgtgagcaccactctctgtacggagctgcccggtaccggctggctctgaaggatggacatggcacagcaatctcaaatgcatctgatgtctggaagaaaggaggctcagaggaaagcctttgtgaccagccttatcatgagatctataccagagatgggaactcttatgggagaccttgtgaatttccattcttaattgatgggacctggcatcatgattgcattcttgatgaagatcatagtgggccatggtgtgccaccaccttaaattatgaatatgaccgaaagtggggcatctgcttaaagcctgaaaacggttgtgaagataattgggaaaagaacgagcagtttggaagttgctaccaatttaatactcagacggctctttcttggaaagaagcttatgtttcatgtcagaatcaaggagctgatttactgagcatcaacagtgctgctgaattaacttaccttaaagaaaaagaaggcattgctaagattttctggattggtttaaatcagctatactctgctagaggctgggaatggtcagaccacaaaccattaaactttctcaactgggatccagacaggcccagtgcacctactataggtggctccagctgtgcaagaatggatgctgagtctggtctgtggcagagcttttcctgtgaagctcaactgccctatgtctgcaggaaaccattaaataatacagtggagttaacagatgtctggacatactcagatacccgctgtgatgcaggctggctgccaaataatggattttgctatctgctggtaaatgaaagtaattcctgggataaggcacatgcgaaatgcaaagccttcagtagtgacctaatcagcattcattctctagcagatgtggaggtggttgtcacaaaactccataatgaggatatcaaagaagaagtgtggataggccttaagaacataaacataccaactttatttcagtggtcagatggtactgaagttactctaacatattgggatgagaatgagccaaatgttccctacaataagacgcccaactgtgtttcctacttaggagagctaggtcagtggaaagtccaatcatgtgaggagaaactaaaatatgtatgcaagagaaagggagaaaaactgaatgacgcaagttctgataagatgtgtcctccagatgagggctggaagagacatggagaaacctgttacaagatttatgaggatgaggtcccttttggaacaaactgcaatctgactatcactagcagatttgagcaagaatacctaaatgatttgatgaaaaagtatgataaatctctaagaaaatacttctggactggcctgagagatgtagattcttgtggagagtataactgggcaactgttggtggaagaaggcgggctgtaaccttttccaactggaattttcttgagccagcttccccgggcggctgcgtggctatgtctactggaaagtctgttggaaagtgggaggtgaaggactgcagaagcttcaaagcactttcaatttgcaagaaaatgagtggaccccttgggcctgaagaagcatcccctaagcctgatgacccctgtcctgaaggctggcagagtttccccgcaagtctttcttgttataaggtattccatgcagaaagaattgtaagaaagaggaactgggaagaagctgaacgattctgccaagcccttggagcacacctttctagcttcagccatgtggatgaaataaaggaatttcttcactttttaacggaccagttcagtggccagcattggctgtggattggtttgaataaaaggagcccagatttacaaggatcctggcaatggagtgatcgtacaccagtgtctactattatcatgccaaatgagtttcagcaggattatgacatcagagactgtgctgctgtcaaggtatttcataggccatggcgaagaggctggcatttctatgatgatagagaatttatttatttgaggccttttgcttgtgatacaaaacttgaatgggtgtgccaaattccaaaaggccgtactccaaaaacaccagactggtacaatccagaccgtgctggaattcatggacctccacttataattgaaggaagtgaatattggtttgttgctgatcttcacctaaactatgaagaagccgtcctgtactgtgccagcaatcacagctttcttgcaactataacatcttttgtgggactaaaagccatcaaaaacaaaatagcaaatatatctggtgatggacagaagtggtggataagaattagcgagtggccaatagatgatcattttacatactcacgatatccatggcaccgctttcctgtgacatttggagaggaatgcttgtacatgtctgccaagacttggcttatcgacttaggtaaaccaacagactgtagtaccaagttgcccttcatctgtgaaaaatataatgtttcttcgttagagaaatacagcccagattctgcagctaaagtgcaatgttctgagcaatggattccttttcagaataagtgttttctaaagatcaaacccgtgtctctcacattttctcaagcaagcgatacctgtcactcctatggtggcacccttccttcagtgttgagccagattgaacaagactttattacatccttgcttccggatatggaagctactttatggattggtttgcgctggactgcctatgaaaagataaacaaatggacagataacagagagctgacgtacagtaactttcacccattattggttagtgggaggctgagaataccagaaaatttttttgaggaagagtctcgctaccactgtgccctaatactcaacctccaaaaatcaccgtttactgggacgtggaattttacatcctgcagtgaacgccactttgtgtctctctgtcagaaatattcagaagttaaaagcagacagacgttgcagaatgcttcagaaactgtaaagtatctaaataatctgtacaaaataatcccaaagactctgacttggcacagtgctaaaagggagtgtctgaaaagtaacatgcagctggtgagcatcacggacccttaccagcaggcattcctcagtgtgcaggcgctccttcacaactcttccttatggatcggactcttcagtcaagatgatgaactcaactttggttggtcagatgggaaacgtcttcattttagtcgctgggctgaaactaatgggcaactcgaagactgtgtagtattagacactgatggattctggaaaacagttgattgcaatgacaatcaaccaggtgctatttgctactattcaggaaatgagactgaaaaagaggtcaaaccagttgacagtgttaaatgtccatctcctgttctaaatactctgtggataccatttcagaactgttgctacaatttcataataacaaagaataggcatatggcaacaacacaggatgaagttcatactaaatgccagaaactgaatccaaaatcacatattctgagtattcgagatgaaaaggagaataactttgttcttgagcaactgctgtacttcaattatatggcttcatgggtcatgttaggaataacttatagaaataagtctcttatgtggtttgataagaccccactgtcatatacacattggagagcaggaagaccaactataaaaaatgagaagtttttggctggtttaagtactgacggcttctgggatattcaaacctttaaagttattgaagaagcagtttattttcaccagcacagcattcttgcttgtaaaattgaaatggttgactacaaagaagaatataatactacactgccacagtttatgccatatgaagatggtatttacagtgttattcaaaaaaaggtaacatggtatgaagcattaaacatgtgttctcaaagtggaggtcacttggcaagcgttcacaaccaaaatggccagctctttctggaagatattgtaaaacgtgatggatttccactatgggttgggctctcaagtcatgatggaagtgaatcaagttttgaatggtctgatggtagtacatttgactatatcccatggaaaggccaaacatctcctggaaattgtgttctcttggatccaaaaggaacttggaaacatgaaaaatgcaactctgttaaggatggtgctatttgttataaacctacaaaatctaaaaagctgtcccgtcttacatattcatcaagatgtccagcagcaaaagagaatgggtcacggtggatccagtacaagggtcactgttacaagtctgatcaggcattgcacagtttttcagaggccaaaaaattgtgttcaaaacatgatcactctgcaactatcgtttccataaaagatgaagatgagaataaatttgtgagcagactgatgagggaaaataataacattaccatgagagtttggcttggattatctcaacattctgttgaccagtcttggagttggttagatggatcagaagtgacatttgtcaaatgggaaaataaaagtaagagtggtgttggaagatgtagcatgttgatagcttcaaatgaaacttggaaaaaagttgaatgtgaacatggttttggaagagttgtctgcaaagtgcctctgggccctgattacacagcaatagctatcatagttgccacactaagtatcttagttctcatgggcggactgatttggttcctcttccaaaggcaccgtttgcacctggcgggtttctcatcagttcgatatgcacaaggagtgaatgaagatgagattatgcttccttctttccatgactaaattcttctaaaagttttctaatttgcactaatgtgttatgagaaattagtcacttaaaatgtcccagtgtcagtatttactctgctccaaagtagaactcttaaatactttttcagttgtttagatcttaggcatgtgctggtatccacagttaattccctgctaaatgccatgtttatcaccctaattaatagaatggaggggactccaaagctggaactgaagtccaaattgtttgtacagtaatatgtttaatgttcattttctctgtatgaatgtgattggtaactaggatatgtatattttaatagaatttttaacaaaacttcttagaaaattaaaataggcatattactaggtgacatgtctactttttaatttttaagagcatccggccaaatgcaaaattagtacctcaaagtaaaaattgaactgtaaactctatcagcattgtttcaaaatagtcatttttagcactggggaaaaataaacaataagacatgcttactttttaatttttatttttttgagactgagtctctctctgttgcccaggctggagtacaatggcgtgatctcggctcactgcaaatctccgcctcccaggttcaagcgattctcctgcctcagcctcctgagtagctgggattacaggcaactgccaccatgcccggctaatttttgtatttttagtagagatggggtttcaccatgttggccaggctggtctcgaactcgtgaccgcaggtgatcctcccgcctcggcctcccaaagtgctgggattacaggcatgagccaccgcgcctggcctctgcttactttttatatagcaaaatgattcctcttggcaagatgtttcttatattattccaaagttatttcataccattattatgtaaatatgaagagtttttttctgtttataattgtttataaaacaatgacttttaaagatttagtgcttaacattttcccaagtgtgggaacattatttttagattgagtaggtaccttgtagcagtgtgctttgcattttctgatgtattacatgactgtttcttttgtaaagagaatcaactaggtatttaagactgataattttacaatttatatgcttcacatagcatgtcaacttttgactaagaattttgttttacttttttaacatgtgttaaacagagaaagggtccatgaaggaaagtgtatgagttgcatttgtaaaaatgagactttttcagtggaactctaaaccttgtgatgactactaacaaatgtaaaattatgagtgattaagaaaacattgctttgtggttatcactttaagttttgacacctagattatagtcttagtaatagcatccactggaaaaggtgaaaatgttttattcggcatttaacttacatttgtactttatttttgtataaaatccatagatttattttacatttagagtatttacactatgataaagttgtaaataattttctaagacagtttttatatagtctacagttgtcctgatttcttattgaatttgttagactagttctcttgtcctgtgatctgtgtacaattttagtcactaagactttcctccaagaactaagccaacttgatgtgaaaagcacagctgtatataatggtgatgtcataataaagttgttttatcttttaagtaaaagtaaaa

SEQ ID NO: 37 - DNA, 5650 bp, Homo sapiens
  source 1..5650: mol_type = genomic DNA
ccggccggaaggcttgcgccagctcaggatgaggacaggctgggcgacccctcgccgcccggcggggctcctcatgctgctcttctggttcttcgatctcgcggagccctctggccgcgcagctaatgaccccttcaccatcgtccatggaaatacgggcaagtgcatcaagccagtgtatggctggatagtagcagacgactgtgatgaaactgaggacaagttatggaagtgggtgtcccagcatcggctctttcatttgcactcccaaaagtgccttggcctcgatattaccaaatcggtaaatgagctgagaatgttcagctgtgactccagtgccatgctgtggtggaaatgtgagcaccactctctgtacggagctgcccggtaccggctggctctgaaggatggacatggcacagcaatctcaaatgcatctgatgtctggaagaaaggaggctcagaggaaagcctttgtgaccagccttatcatgagatctataccagagatgggaactcttatgggagaccttgtgaatttccattcttaattgatgggacctggcatcatgattgcattcttgatgaagatcatagtgggccatggtgtgccaccaccttaaattatgaatatgaccgaaagtggggcatctgcttaaagcctgaaaacggttgtgaagataattgggaaaagaacgagcagtttggaagttgctaccaatttaatactcagacggctctttcttggaaagaagcttatgtttcatgtcagaatcaaggagctgatttactgagcatcaacagtgctgctgaattaacttaccttaaagaaaaagaaggcattgctaagattttctggattggtttaaatcagctatactctgctagaggctgggaatggtcagaccacaaaccattaaactttctcaactgggatccagacaggcccagtgcacctactataggtggctccagctgtgcaagaatggatgctgagtctggtctgtggcagagcttttcctgtgaagctcaactgccctatgtctgcaggaaaccattaaataatacagtggagttaacagatgtctggacatactcagatacccgctgtgatgcaggctggctgccaaataatggattttgctatctgctggtaaatgaaagtaattcctgggataaggcacatgcgaaatgcaaagccttcagtagtgacctaatcagcattcattctctagcagatgtggaggtggttgtcacaaaactccataatgaggatatcaaagaagaagtgtggataggccttaagaacataaacataccaactttatttcagtggtcagatggtactgaagttactctaacatattgggatgagaatgagccaaatgttccctacaataagacgcccaactgtgtttcctacttaggagagctaggtcagtggaaagtccaatcatgtgaggagaaactaaaatatgtatgcaagagaaagggagaaaaactgaatgacgcaagttctgataagatgtgtcctccagatgagggctggaagagacatggagaaacctgttacaagatttatgaggatgaggtcccttttggaacaaactgcaatctgactatcactagcagatttgagcaagaatacctaaatgatttgatgaaaaagtatgataaatctctaagaaaatacttctggactggcctgagagatgtagattcttgtggagagtataactgggcaactgttggtggaagaaggcgggctgtaaccttttccaactggaattttcttgagccagcttccccgggcggctgcgtggctatgtctactggaaagtctgttggaaagtgggaggtgaaggactgcagaagcttcaaagcactttcaatttgcaagaaaatgagtggaccccttgggcctgaagaagcatcccctaagcctgatgacccctgtcctgaaggctggcagagtttccccgcaagtctttcttgttataaggtattccatgcagaaagaattgtaagaaagaggaactgggaagaagctgaacgattctgccaagcccttggagcacacctttctagcttcagccatgtggatgaaataaaggaatttcttcactttttaacggaccagttcagtggccagcattggctgtggattggtttgaataaaaggagcccagatttacaaggatcctggcaatggagtgatcgtacaccagtgtctactattatcatgccaaatgagtttcagcaggattatgacatcagagactgtgctgctgtcaaggtatttcataggccatggcgaagaggctggcatttctatgatgatagagaatttatttatttgaggccttttgcttgtgatacaaaacttgaatgggtgtgccaaattccaaaaggccgtactccaaaaacaccagactggtacaatccagaccgtgctggaattcatggacctccacttataattgaaggaagtgaatattggtttgttgctgatcttcacctaaactatgaagaagccgtcctgtactgtgccagcaatcacagctttcttgcaactataacatcttttgtgggactaaaagccatcaaaaacaaaatagcaaatatatctggtgatggacagaagtggtggataagaattagcgagtggccaatagatgatcattttacatactcacgatatccatggcaccgctttcctgtgacatttggagaggaatgcttgtacatgtctgccaagacttggcttatcgacttaggtaaaccaacagactgtagtaccaagttgcccttcatctgtgaaaaatataatgtttcttcgttagagaaatacagcccagattctgcagctaaagtgcaatgttctgagcaatggattccttttcagaataagtgttttctaaagatcaaacccgtgtctctcacattttctcaagcaagcgatacctgtcactcctatggtggcacccttccttcagtgttgagccagattgaacaagactttattacatccttgcttccggatatggaagctactttatggattggtttgcgctggactgcctatgaaaagataaacaaatggacagataacagagagctgacgtacagtaactttcacccattattggttagtgggaggctgagaataccagaaaatttttttgaggaagagtctcgctaccactgtgccctaatactcaacctccaaaaatcaccgtttactgggacgtggaattttacatcctgcagtgaacgccactttgtgtctctctgtcagaaatattcagaagttaaaagcagacagacgttgcagaatgcttcagaaactgtaaagtatctaaataatctgtacaaaataatcccaaagactctgacttggcacagtgctaaaagggagtgtctgaaaagtaacatgcagctggtgagcatcacggacccttaccagcaggcattcctcagtgtgcaggcgctccttcacaactcttccttatggatcggactcttcagtcaagatgatgaactcaactttggttggtcagatgggaaacgtcttcattttagtcgctgggctgaaactaatgggcaactcgaagactgtgtagtattagacactgatggattctggaaaacagttgattgcaatgacaatcaaccaggtgctatttgctactattcaggaaatgagactgaaaaagaggtcaaaccagttgacagtgttaaatgtccatctcctgttctaaatactctgtggataccatttcagaactgttgctacaatttcataataacaaagaataggcatatggcaacaacacaggatgaagttcatactaaatgccagaaactgaatccaaaatcacatattctgagtattcgagatgaaaaggagaataactttgttcttgagcaactgctgtacttcaattatatggcttcatgggtcatgttaggaataacttatagaaataagtctcttatgtggtttgataagaccccactgtcatatacacattggagagcaggaagaccaactataaaaaatgagaagtttttggctggtttaagtactgacggcttctgggatattcaaacctttaaagttattgaagaagcagtttattttcaccagcacagcattcttgcttgtaaaattgaaatggttgactacaaagaagaatataatactacactgccacagtttatgccatatgaagatggtatttacagtgttattcaaaaaaaggtaacatggtatgaagcattaaacatgtgttctcaaagtggaggtcacttggcaagcgttcacaaccaaaatggccagctctttctggaagatattgtaaaacgtgatggatttccactatgggttgggctctcaagtcatgatggaagtgaatcaagttttgaatggtctgatggtagtacatttgactatatcccatggaaaggccaaacatctcctggaaattgtgttctcttggatccaaaaggaacttggaaacatgaaaaatgcaactctgttaaggatggtgctatttgttataaacctacaaaatctaaaaagctgtcccgtcttacatattcatcaagatgtccagcagcaaaagagaatgggtcacggtggatccagtacaagggtcactgttacaagtctgatcaggcattgcacagtttttcagaggccaaaaaattgtgttcaaaacatgatcactctgcaactatcgtttccataaaagatgaagatgagaataaatttgtgagcagactgatgagggaaaataataacattaccatgagagtttggcttggattatctcaacattctgttgaccagtcttggagttggttagatggatcagaagtgacatttgtcaaatgggaaaataaaagtaagagtggtgttggaagatgtagcatgttgatagcttcaaatgaaacttggaaaaaagttgaatgtgaacatggttttggaagagttgtctgcaaagtgcctctggactgtccttcatctacttggattcagttccaagacagttgttacatttttctccaagaagccatcaaagtagaaagcatagaggatgtcagaaatcagtgtactgaccatggagcggacatgataagcatacataatgaagaagaaaatgcttttatactggatactttgaaaaagcaatggaaaggcccagatgatatcctactaggcatgttttatgacacagatgatgcgagtttcaagtggtttgataattcaaatatgacatttgataagtggacagaccaagatgatgatgaggatttagttgacacctgtgcttttctgcacatcaagacaggtgaatggaaaaaaggaaattgtgaagtttcttctgtggaaggaacactatgcaaaacagctatcccatacaaaaggaaatatttatcagataaccacattttaatatcagcattggtgattgctagcacggtaattttgacagttttgggagcaatcatttggttcctgtacaaaaaacattctgattctcgtttcaccacagttttttcaaccgcaccccaatcaccttataatgaagactgtgttttggtagttggagaagaaaatgaatatcctgttcaatttgactaa

SEQ ID NO: 38 - DNA, 5482 bp, Homo sapiens
  source 1..5482: mol_type = genomic DNA
ccggccggaaggcttgcgccagctcaggatgaggacaggctgggcgacccctcgccgcccggcggggctcctcatgctgctcttctggttcttcgatctcgcggagccctctggccgcgcagctaatgaccccttcaccatcgtccatggaaatacgggcaagtgcatcaagccagtgtatggctggatagtagcagacgactgtgatgaaactgaggacaagttatggaagtgggtgtcccagcatcggctctttcatttgcactcccaaaagtgccttggcctcgatattaccaaatcggtaaatgagctgagaatgttcagctgtgactccagtgccatgctgtggtggaaatgtgagcaccactctctgtacggagctgcccggtaccggctggctctgaaggatggacatggcacagcaatctcaaatgcatctgatgtctggaagaaaggaggctcagaggaaagcctttgtgaccagccttatcatgagatctataccagagatgggaactcttatgggagaccttgtgaatttccattcttaattgatgggacctggcatcatgattgcattcttgatgaagatcatagtgggccatggtgtgccaccaccttaaattatgaatatgaccgaaagtggggcatctgcttaaagcctgaaaacggttgtgaagataattgggaaaagaacgagcagtttggaagttgctaccaatttaatactcagacggctctttcttggaaagaagcttatgtttcatgtcagaatcaaggagctgatttactgagcatcaacagtgctgctgaattaacttaccttaaagaaaaagaaggcattgctaagattttctggattggtttaaatcagctatactctgctagaggctgggaatggtcagaccacaaaccattaaactttctcaactgggatccagacaggcccagtgcacctactataggtggctccagctgtgcaagaatggatgctgagtctggtctgtggcagagcttttcctgtgaagctcaactgccctatgtctgcaggaaaccattaaataatacagtggagttaacagatgtctggacatactcagatacccgctgtgatgcaggctggctgccaaataatggattttgctatctgctggtaaatgaaagtaattcctgggataaggcacatgcgaaatgcaaagccttcagtagtgacctaatcagcattcattctctagcagatgtggaggtggttgtcacaaaactccataatgaggatatcaaagaagaagtgtggataggccttaagaacataaacataccaactttatttcagtggtcagatggtactgaagttactctaacatattgggatgagaatgagccaaatgttccctacaataagacgcccaactgtgtttcctacttaggagagctaggtcagtggaaagtccaatcatgtgaggagaaactaaaatatgtatgcaagagaaagggagaaaaactgaatgacgcaagttctgataagatgtgtcctccagatgagggctggaagagacatggagaaacctgttacaagatttatgaggatgaggtcccttttggaacaaactgcaatctgactatcactagcagatttgagcaagaatacctaaatgatttgatgaaaaagtatgataaatctctaagaaaatacttctggactggcctgagagatgtagattcttgtggagagtataactgggcaactgttggtggaagaaggcgggctgtaaccttttccaactggaattttcttgagccagcttccccgggcggctgcgtggctatgtctactggaaagtctgttggaaagtgggaggtgaaggactgcagaagcttcaaagcactttcaatttgcaagaaaatgagtggaccccttgggcctgaagaagcatcccctaagcctgatgacccctgtcctgaaggctggcagagtttccccgcaagtctttcttgttataaggtattccatgcagaaagaattgtaagaaagaggaactgggaagaagctgaacgattctgccaagcccttggagcacacctttctagcttcagccatgtggatgaaataaaggaatttcttcactttttaacggaccagttcagtggccagcattggctgtggattggtttgaataaaaggagcccagatttacaaggatcctggcaatggagtgatcgtacaccagtgtctactattatcatgccaaatgagtttcagcaggattatgacatcagagactgtgctgctgtcaaggtatttcataggccatggcgaagaggctggcatttctatgatgatagagaatttatttatttgaggccttttgcttgtgatacaaaacttgaatgggtgtgccaaattccaaaaggccgtactccaaaaacaccagactggtacaatccagaccgtgctggaattcatggacctccacttataattgaaggaagtgaatattggtttgttgctgatcttcacctaaactatgaagaagccgtcctgtactgtgccagcaatcacagctttcttgcaactataacatcttttgtgggactaaaagccatcaaaaacaaaatagcaaatatatctggtgatggacagaagtggtggataagaattagcgagtggccaatagatgatcattttacatactcacgatatccatggcaccgctttcctgtgacatttggagaggaatgcttgtacatgtctgccaagacttggcttatcgacttaggtaaaccaacagactgtagtaccaagttgcccttcatctgtgaaaaatataatgtttcttcgttagagaaatacagcccagattctgcagctaaagtgcaatgttctgagcaatggattccttttcagaataagtgttttctaaagatcaaacccgtgtctctcacattttctcaagcaagcgatacctgtcactcctatggtggcacccttccttcagtgttgagccagattgaacaagactttattacatccttgcttccggatatggaagctactttatggattggtttgcgctggactgcctatgaaaagataaacaaatggacagataacagagagctgacgtacagtaactttcacccattattggttagtgggaggctgagaataccagaaaatttttttgaggaagagtctcgctaccactgtgccctaatactcaacctccaaaaatcaccgtttactgggacgtggaattttacatcctgcagtgaacgccactttgtgtctctctgtcagaaatattcagaagttaaaagcagacagacgttgcagaatgcttcagaaactgtaaagtatctaaataatctgtacaaaataatcccaaagactctgacttggcacagtgctaaaagggagtgtctgaaaagtaacatgcagctggtgagcatcacggacccttaccagcaggcattcctcagtgtgcaggcgctccttcacaactcttccttatggatcggactcttcagtcaagatgatgaactcaactttggttggtcagatgggaaacgtcttcattttagtcgctgggctgaaactaatgggcaactcgaagactgtgtagtattagacactgatggattctggaaaacagttgattgcaatgacaatcaaccaggtgctatttgctactattcaggaaatgagactgaaaaagaggtcaaaccagttgacagtgttaaatgtccatctcctgttctaaatactctgtggataccatttcagaactgttgctacaatttcataataacaaagaataggcatatggcaacaacacaggatgaagttcatactaaatgccagaaactgaatccaaaatcacatattctgagtattcgagatgaaaaggagaataactttgttcttgagcaactgctgtacttcaattatatggcttcatgggtcatgttaggaataacttatagaaataagtctcttatgtggtttgataagaccccactgtcatatacacattggagagcaggaagaccaactataaaaaatgagaagtttttggctggtttaagtactgacggcttctgggatattcaaacctttaaagttattgaagaagcagtttattttcaccagcacagcattcttgcttgtaaaattgaaatggttgactacaaagaagaatataatactacactgccacagtttatgccatatgaagatggtatttacagtgttattcaaaaaaaggtaacatggtatgaagcattaaacatgtgttctcaaagtggaggtcacttggcaagcgttcacaaccaaaatggccagctctttctggaagatattgtaaaacgtgatggatttccactatgggttgggctctcaagtcatgatggaagtgaatcaagttttgaatggtctgatggtagtacatttgactatatcccatggaaaggccaaacatctcctggaaattgtgttctcttggatccaaaaggaacttggaaacatgaaaaatgcaactctgttaaggatggtgctatttgttataaacctacaaaatctaaaaagctgtcccgtcttacatattcatcaagatgtccagcagcaaaagagaatgggtcacggtggatccagtacaagggtcactgttacaagtctgatcaggcattgcacagtttttcagaggccaaaaaattgtgttcaaaacatgatcactctgcaactatcgtttccataaaagatgaagatgagaataaatttgtgagcagactgatgagggaaaataataacattaccatgagagtttggcttggattatctcaacattctgttgactgtccttcatctacttggattcagttccaagacagttgttacatttttctccaagaagccatcaaagtagaaagcatagaggatgtcagaaatcagtgtactgaccatggagcggacatgataagcatacataatgaagaagaaaatgcttttatactggatactttgaaaaagcaatggaaaggcccagatgatatcctactaggcatgttttatgacacagatgatgcgagtttcaagtggtttgataattcaaatatgacatttgataagtggacagaccaagatgatgatgaggatttagttgacacctgtgcttttctgcacatcaagacaggtgaatggaaaaaaggaaattgtgaagtttcttctgtggaaggaacactatgcaaaacagctatcccatacaaaaggaaatatttatcagataaccacattttaatatcagcattggtgattgctagcacggtaattttgacagttttgggagcaatcatttggttcctgtacaaaaaacattctgattctcgtttcaccacagttttttcaaccgcaccccaatcaccttataatgaagactgtgttttggtagttggagaagaaaatgaatatcctgttcaatttgactaa

SEQ ID NO: 39 - DNA, 8919 bp, Homo sapiens
  source 1..8919: mol_type = genomic DNA
aggccgcgctcagcaggcggggcgggagccgcgtgcgcccgaggacccggccggaaggcttgcgccagctcaggatgaggacaggctgggcgacccctcgccgcccggcggggctcctcatgctgctcttctggttcttcgatctcgcggagccctctggccgcgcagctaatgaccccttcaccatcgtccatggaaatacgggcaagtgcatcaagccagtgtatggctggatagtagcagacgactgtgatgaaactgaggacaagttatggaagtgggtgtcccagcatcggctctttcatttgcactcccaaaagtgccttggcctcgatattaccaaatcggtaaatgagctgagaatgttcagctgtgactccagtgccatgctgtggtggaaatgtgagcaccactctctgtacggagctgcccggtaccggctggctctgaaggatggacatggcacagcaatctcaaatgcatctgatgtctggaagaaaggaggctcagaggaaagcctttgtgaccagccttatcatgagatctataccagagatgggaactcttatgggagaccttgtgaatttccattcttaattgatgggacctggcatcatgattgcattcttgatgaagatcatagtgggccatggtgtgccaccaccttaaattatgaatatgaccgaaagtggggcatctgcttaaagcctgaaaacggttgtgaagataattgggaaaagaacgagcagtttggaagttgctaccaatttaatactcagacggctctttcttggaaagaagcttatgtttcatgtcagaatcaaggagctgatttactgagcatcaacagtgctgctgaattaacttaccttaaagaaaaagaaggcattgctaagattttctggattggtttaaatcagctatactctgctagaggctgggaatggtcagaccacaaaccattaaactttctcaactgggatccagacaggcccagtgcacctactataggtggctccagctgtgcaagaatggatgctgagtctggtctgtggcagagcttttcctgtgaagctcaactgccctatgtctgcaggaaaccattaaataatacagtggagttaacagatgtctggacatactcagatacccgctgtgatgcaggctggctgccaaataatggattttgctatctgctggtaaatgaaagtaattcctgggataaggcacatgcgaaatgcaaagccttcagtagtgacctaatcagcattcattctctagcagatgtggaggtggttgtcacaaaactccataatgaggatatcaaagaagaagtgtggataggccttaagaacataaacataccaactttatttcagtggtcagatggtactgaagttactctaacatattgggatgagaatgagccaaatgttccctacaataagacgcccaactgtgtttcctacttaggagagctaggtcagtggaaagtccaatcatgtgaggagaaactaaaatatgtatgcaagagaaagggagaaaaactgaatgacgcaagttctgataagatgtgtcctccagatgagggctggaagagacatggagaaacctgttacaagatttatgaggatgaggtcccttttggaacaaactgcaatctgactatcactagcagatttgagcaagaatacctaaatgatttgatgaaaaagtatgataaatctctaagaaaatacttctggactggcctgagagatgtagattcttgtggagagtataactgggcaactgttggtggaagaaggcgggctgtaaccttttccaactggaattttcttgagccagcttccccgggcggctgcgtggctatgtctactggaaagtctgttggaaagtgggaggtgaaggactgcagaagcttcaaagcactttcaatttgcaagaaaatgagtggaccccttgggcctgaagaagcatcccctaagcctgatgacccctgtcctgaaggctggcagagtttccccgcaagtctttcttgttataaggtattccatgcagaaagaattgtaagaaagaggaactgggaagaagctgaacgattctgccaagcccttggagcacacctttctagcttcagccatgtggatgaaataaaggaatttcttcactttttaacggaccagttcagtggccagcattggctgtggattggtttgaataaaaggagcccagatttacaaggatcctggcaatggagtgatcgtacaccagtgtctactattatcatgccaaatgagtttcagcaggattatgacatcagagactgtgctgctgtcaaggtatttcataggccatggcgaagaggctggcatttctatgatgatagagaatttatttatttgaggccttttgcttgtgatacaaaacttgaatgggtgtgccaaattccaaaaggccgtactccaaaaacaccagactggtacaatccagaccgtgctggaattcatggacctccacttataattgaaggaagtgaatattggtttgttgctgatcttcacctaaactatgaagaagccgtcctgtactgtgccagcaatcacagctttcttgcaactataacatcttttgtgggactaaaagccatcaaaaacaaaatagcaaatatatctggtgatggacagaagtggtggataagaattagcgagtggccaatagatgatcattttacatactcacgatatccatggcaccgctttcctgtgacatttggagaggaatgcttgtacatgtctgccaagacttggcttatcgacttaggtaaaccaacagactgtagtaccaagttgcccttcatctgtgaaaaatataatgtttcttcgttagagaaatacagcccagattctgcagctaaagtgcaatgttctgagcaatggattccttttcagaataagtgttttctaaagatcaaacccgtgtctctcacattttctcaagcaagcgatacctgtcactcctatggtggcacccttccttcagtgttgagccagattgaacaagactttattacatccttgcttccggatatggaagctactttatggattggtttgcgctggactgcctatgaaaagataaacaaatggacagataacagagagctgacgtacagtaactttcacccattattggttagtgggaggctgagaataccagaaaatttttttgaggaagagtctcgctaccactgtgccctaatactcaacctccaaaaatcaccgtttactgggacgtggaattttacatcctgcagtgaacgccactttgtgtctctctgtcagaaatattcagaagttaaaagcagacagacgttgcagaatgcttcagaaactgtaaagtatctaaataatctgtacaaaataatcccaaagactctgacttggcacagtgctaaaagggagtgtctgaaaagtaacatgcagctggtgagcatcacggacccttaccagcaggcattcctcagtgtgcaggcgctccttcacaactcttccttatggatcggactcttcagtcaagatgatgaactcaactttggttggtcagatgggaaacgtcttcattttagtcgctgggctgaaactaatgggcaactcgaagactgtgtagtattagacactgatggattctggaaaacagttgattgcaatgacaatcaaccaggtgctatttgctactattcaggaaatgagactgaaaaagaggtcaaaccagttgacagtgttaaatgtccatctcctgttctaaatactctgtggataccatttcagaactgttgctacaatttcataataacaaagaataggcatatggcaacaacacaggatgaagttcatactaaatgccagaaactgaatccaaaatcacatattctgagtattcgagatgaaaaggagaataactttgttcttgagcaactgctgtacttcaattatatggcttcatgggtcatgttaggaataacttatagaaataagtctcttatgtggtttgataagaccccactgtcatatacacattggagagcaggaagaccaactataaaaaatgagaagtttttggctggtttaagtactgacggcttctgggatattcaaacctttaaagttattgaagaagcagtttattttcaccagcacagcattcttgcttgtaaaattgaaatggttgactacaaagaagaatataatactacactgccacagtttatgccatatgaagatggtatttacagtgttattcaaaaaaaggtaacatggtatgaagcattaaacatgtgttctcaaagtggaggtcacttggcaagcgttcacaaccaaaatggccagctctttctggaagatattgtaaaacgtgatggatttccactatgggttgggctctcaagtcatgatggaagtgaatcaagttttgaatggtctgatggtagtacatttgactatatcccatggaaaggccaaacatctcctggaaattgtgttctcttggatccaaaaggaacttggaaacatgaaaaatgcaactctgttaaggatggtgctatttgttataaacctacaaaatctaaaaagctgtcccgtcttacatattcatcaagatgtccagcagcaaaagagaatgggtcacggtggatccagtacaagggtcactgttacaagtctgatcaggcattgcacagtttttcagaggccaaaaaattgtgttcaaaacatgatcactctgcaactatcgtttccataaaagatgaagatgagaataaatttgtgagcagactgatgagggaaaataataacattaccatgagagtttggcttggattatctcaacattctgttgaccagtcttggagttggttagatggatcagaagtgacatttgtcaaatgggaaaataaaagtaagagtggtgttggaagatgtagcatgttgatagcttcaaatgaaacttggaaaaaagttgaatgtgaacatggttttggaagagttgtctgcaaagtgcctctggactgtccttcatctacttggattcagttccaagacagttgttacatttttctccaagaagccatcaaagtagaaagcatagaggatgtcagaaatcagtgtactgaccatggagcggacatgataagcatacataatgaagaagaaaatgcttttatactggatactttgaaaaagcaatggaaaggcccagatgatatcctactaggcatgttttatgacacagatgatgcgagtttcaagtggtttgataattcaaatatgacatttgataagtggacagaccaagatgatgatgaggatttagttgacacctgtgcttttctgcacatcaagacaggtgaatggaaaaaaggaaattgtgaagtttcttctgtggaaggaacactatgcaaaacagctatcccatacaaaaggaaatatttatcagataaccacattttaatatcagcattggtgattgctagcacggtaattttgacagttttgggagcaatcatttggttcctgtacaaaaaacattctgattctcgtttcaccacagttttttcaaccgcaccccaatcaccttataatgaagactgtgttttggtagttggagaagaaaatgaatatcctgttcaatttgactaagtttttggtaatcttgcactaagacatcaacaaaatgccctggcagagataacttgggaaagattttaatataaaacttgacattggatattagagctttaatggtattccttattccagtaacatttttatgtactcatctgctgtgaaaagtctttaggttcattaaaaaaacaggttttagaaatgatcttagatctaatatagtgattttaagcatcccgtcaaaggcagaatctgtcacttgaatgaaggaaagcttaaagcccaagcagataaaaataaaagcccagcctatttgtcttgcctgctgtatcttccctatttagttgacccactttagtttatatgtttattagtaaacatgaaatggggaataagtgattttaagtacatcccatacatttaaatatctttgataattgttatttttttggcagataattcctctagaatgtgtatctttttatgatttagatgaagaaaattttacaacttttaacaccccacaccaattttagtttcattacttttacacacaccattttatcacaaatgactcaagttttaatgaatgtttataaattatttgaaacaaaatatgatcgctgtgtccaggatggcatagagaaagctggcaattaggttaacacttacatattatagtgcccctttaaggatttctctcttgccaccataccttttgtactttcccctatacaagatgtatctcattctcctcaagcatttataaatttttccttcaatgacatgaaaactgtgcaagcaaaaaccgaagaaaaacacttaagtacaactgtagtgacagtgatcaaagttttcagtgcatttattgtacattttaagaaaaaggtgaaaatcatttggggagtaaaaaaatgaaaaagctgaaacgagtaattttcctcaccatcaataaaccaaaaacaggaaagataaagaatgtataaatttcacgtaaattagtcacgtatcacttatcaatggggatacgttctaagaaatgcatagttagggaatcttgtgtgaaaatcagcttgtatttacacaaacccagatggtagagcctattttgtcccaaacctacacagcatgttactgtgctgaatactgcagacaattgtaacacaatatttgtgtatctaaatatagaaaaggtacagtaaaaatatggtctactaaggaaacactgttctatatgtggtccattactgactgaagtatactgtctagaagtctgaggctcaaagaaaagtaatccctcttctgaatccacaccccatcaattatcttactttcttctggggagatagatagatatactatctcactagcttgactaatggcaacaaagttccagcttgtgtagtctctttttattgaccacatgaatcgaaaacactcatcacaattaatggcactatcattaatgagacatgagtaactaaaaagtgatagaaaactattaacagtgcggctacatggtactgaaaatgcaggcattacaccagctgttacacaagcacaagcatgctctgtaagagctttacatttctgagattttgtatagtgattgagatgtctattttattattgatagactattactaatgtcaatattgaacactaccctggaattcctgcctggttttcctacccaaattgtaccactccttgaagaactacaggcacagtaaaaaaaatatggcgtattatgtgaactaaaagagttctaaaggagttcttaaaggagtggtagaatttgggtaggaaagtgattaagtccaacttaaaaccaacagtctcaaacgtctacaactacaatgtccaatgagccactagccacatgaggctatttaagtaaatttagtttaaaatccagttttcgaattacattagccacattgtcaagtgttcaaatcacaggtggttagtggctactgtactgggcaacatacattatagaacattttcattataggaagttttattgggcagtgctgctcttaaatcctaccttccactcaactcccatacaactttcttttgtacattttgatactttctacctaatggcagctcttccaaaatagctgctttaaactctgatttaattttcaatatttggtttcatttttcaacaggccaagaggcctctggtaatgaagtgctatatatatatatatgatggagtctcactgtgctgcccaggctacagtgcagtggctcgatcttggctctctccaatctccgccttgcaggttttcaagcaattctcctgcctcagcctccttagtagctgggaccacagacatctgtcaccacacccagctaactttttgtatttttggtagagacggggtttcgccatattgactgggctggtctcaaactcctgacctcaagtgatccacccaccttggtctcccaaagtgctgggattacatgcgtgagccaccacacttggcctacattttttctttatataccagaacatctataacaggcaccttatctactcattagtgaagagataattggattacacaggcaggcttgtttactacatccagaatgtagaaactgctttcttcaacatcttggttctagctagtaataacaatataattctttggcagatattcagaataacattttaaactacattttcttagaaaattgcattcttgtagtgagcagtgtatggtctcttttgttcagaatttaaaactgataaccaatgaaagccttttctcttattcctctaccgtcatttacatgataatctgaagctaatatgacaatatttaaatactaagtggtactagggaactacaagaatactgtaaagcttaagccattgttatcactgtcatttagcatttaataacaaaactatacagaattatgtgcataccaatgaatgttttgtaccatctagttaaattttttaaataaagttttatgggttaagcagaagacaactgtcatactgaattttattaaaagtatatatacttcaaattcaaagcatcccttaggacccacagaatatattaaaactaccacccttaaattttatatttttgctttaagacagacaatgcaaaggtaactggcaagaggtgagcaaatgttttagaacatttatattattgcttaaaatgagatttgaaattgtaataaaattcttggttatgaa

SEQ ID NO: 40 - DNA, 8751 bp, Homo sapiens
  source 1..8751: mol_type = genomic DNA
aggccgcgctcagcaggcggggcgggagccgcgtgcgcccgaggacccggccggaaggcttgcgccagctcaggatgaggacaggctgggcgacccctcgccgcccggcggggctcctcatgctgctcttctggttcttcgatctcgcggagccctctggccgcgcagctaatgaccccttcaccatcgtccatggaaatacgggcaagtgcatcaagccagtgtatggctggatagtagcagacgactgtgatgaaactgaggacaagttatggaagtgggtgtcccagcatcggctctttcatttgcactcccaaaagtgccttggcctcgatattaccaaatcggtaaatgagctgagaatgttcagctgtgactccagtgccatgctgtggtggaaatgtgagcaccactctctgtacggagctgcccggtaccggctggctctgaaggatggacatggcacagcaatctcaaatgcatctgatgtctggaagaaaggaggctcagaggaaagcctttgtgaccagccttatcatgagatctataccagagatgggaactcttatgggagaccttgtgaatttccattcttaattgatgggacctggcatcatgattgcattcttgatgaagatcatagtgggccatggtgtgccaccaccttaaattatgaatatgaccgaaagtggggcatctgcttaaagcctgaaaacggttgtgaagataattgggaaaagaacgagcagtttggaagttgctaccaatttaatactcagacggctctttcttggaaagaagcttatgtttcatgtcagaatcaaggagctgatttactgagcatcaacagtgctgctgaattaacttaccttaaagaaaaagaaggcattgctaagattttctggattggtttaaatcagctatactctgctagaggctgggaatggtcagaccacaaaccattaaactttctcaactgggatccagacaggcccagtgcacctactataggtggctccagctgtgcaagaatggatgctgagtctggtctgtggcagagcttttcctgtgaagctcaactgccctatgtctgcaggaaaccattaaataatacagtggagttaacagatgtctggacatactcagatacccgctgtgatgcaggctggctgccaaataatggattttgctatctgctggtaaatgaaagtaattcctgggataaggcacatgcgaaatgcaaagccttcagtagtgacctaatcagcattcattctctagcagatgtggaggtggttgtcacaaaactccataatgaggatatcaaagaagaagtgtggataggccttaagaacataaacataccaactttatttcagtggtcagatggtactgaagttactctaacatattgggatgagaatgagccaaatgttccctacaataagacgcccaactgtgtttcctacttaggagagctaggtcagtggaaagtccaatcatgtgaggagaaactaaaatatgtatgcaagagaaagggagaaaaactgaatgacgcaagttctgataagatgtgtcctccagatgagggctggaagagacatggagaaacctgttacaagatttatgaggatgaggtcccttttggaacaaactgcaatctgactatcactagcagatttgagcaagaatacctaaatgatttgatgaaaaagtatgataaatctctaagaaaatacttctggactggcctgagagatgtagattcttgtggagagtataactgggcaactgttggtggaagaaggcgggctgtaaccttttccaactggaattttcttgagccagcttccccgggcggctgcgtggctatgtctactggaaagtctgttggaaagtgggaggtgaaggactgcagaagcttcaaagcactttcaatttgcaagaaaatgagtggaccccttgggcctgaagaagcatcccctaagcctgatgacccctgtcctgaaggctggcagagtttccccgcaagtctttcttgttataaggtattccatgcagaaagaattgtaagaaagaggaactgggaagaagctgaacgattctgccaagcccttggagcacacctttctagcttcagccatgtggatgaaataaaggaatttcttcactttttaacggaccagttcagtggccagcattggctgtggattggtttgaataaaaggagcccagatttacaaggatcctggcaatggagtgatcgtacaccagtgtctactattatcatgccaaatgagtttcagcaggattatgacatcagagactgtgctgctgtcaaggtatttcataggccatggcgaagaggctggcatttctatgatgatagagaatttatttatttgaggccttttgcttgtgatacaaaacttgaatgggtgtgccaaattccaaaaggccgtactccaaaaacaccagactggtacaatccagaccgtgctggaattcatggacctccacttataattgaaggaagtgaatattggtttgttgctgatcttcacctaaactatgaagaagccgtcctgtactgtgccagcaatcacagctttcttgcaactataacatcttttgtgggactaaaagccatcaaaaacaaaatagcaaatatatctggtgatggacagaagtggtggataagaattagcgagtggccaatagatgatcattttacatactcacgatatccatggcaccgctttcctgtgacatttggagaggaatgcttgtacatgtctgccaagacttggcttatcgacttaggtaaaccaacagactgtagtaccaagttgcccttcatctgtgaaaaatataatgtttcttcgttagagaaatacagcccagattctgcagctaaagtgcaatgttctgagcaatggattccttttcagaataagtgttttctaaagatcaaacccgtgtctctcacattttctcaagcaagcgatacctgtcactcctatggtggcacccttccttcagtgttgagccagattgaacaagactttattacatccttgcttccggatatggaagctactttatggattggtttgcgctggactgcctatgaaaagataaacaaatggacagataacagagagctgacgtacagtaactttcacccattattggttagtgggaggctgagaataccagaaaatttttttgaggaagagtctcgctaccactgtgccctaatactcaacctccaaaaatcaccgtttactgggacgtggaattttacatcctgcagtgaacgccactttgtgtctctctgtcagaaatattcagaagttaaaagcagacagacgttgcagaatgcttcagaaactgtaaagtatctaaataatctgtacaaaataatcccaaagactctgacttggcacagtgctaaaagggagtgtctgaaaagtaacatgcagctggtgagcatcacggacccttaccagcaggcattcctcagtgtgcaggcgctccttcacaactcttccttatggatcggactcttcagtcaagatgatgaactcaactttggttggtcagatgggaaacgtcttcattttagtcgctgggctgaaactaatgggcaactcgaagactgtgtagtattagacactgatggattctggaaaacagttgattgcaatgacaatcaaccaggtgctatttgctactattcaggaaatgagactgaaaaagaggtcaaaccagttgacagtgttaaatgtccatctcctgttctaaatactctgtggataccatttcagaactgttgctacaatttcataataacaaagaataggcatatggcaacaacacaggatgaagttcatactaaatgccagaaactgaatccaaaatcacatattctgagtattcgagatgaaaaggagaataactttgttcttgagcaactgctgtacttcaattatatggcttcatgggtcatgttaggaataacttatagaaataagtctcttatgtggtttgataagaccccactgtcatatacacattggagagcaggaagaccaactataaaaaatgagaagtttttggctggtttaagtactgacggcttctgggatattcaaacctttaaagttattgaagaagcagtttattttcaccagcacagcattcttgcttgtaaaattgaaatggttgactacaaagaagaatataatactacactgccacagtttatgccatatgaagatggtatttacagtgttattcaaaaaaaggtaacatggtatgaagcattaaacatgtgttctcaaagtggaggtcacttggcaagcgttcacaaccaaaatggccagctctttctggaagatattgtaaaacgtgatggatttccactatgggttgggctctcaagtcatgatggaagtgaatcaagttttgaatggtctgatggtagtacatttgactatatcccatggaaaggccaaacatctcctggaaattgtgttctcttggatccaaaaggaacttggaaacatgaaaaatgcaactctgttaaggatggtgctatttgttataaacctacaaaatctaaaaagctgtcccgtcttacatattcatcaagatgtccagcagcaaaagagaatgggtcacggtggatccagtacaagggtcactgttacaagtctgatcaggcattgcacagtttttcagaggccaaaaaattgtgttcaaaacatgatcactctgcaactatcgtttccataaaagatgaagatgagaataaatttgtgagcagactgatgagggaaaataataacattaccatgagagtttggcttggattatctcaacattctgttgactgtccttcatctacttggattcagttccaagacagttgttacatttttctccaagaagccatcaaagtagaaagcatagaggatgtcagaaatcagtgtactgaccatggagcggacatgataagcatacataatgaagaagaaaatgcttttatactggatactttgaaaaagcaatggaaaggcccagatgatatcctactaggcatgttttatgacacagatgatgcgagtttcaagtggtttgataattcaaatatgacatttgataagtggacagaccaagatgatgatgaggatttagttgacacctgtgcttttctgcacatcaagacaggtgaatggaaaaaaggaaattgtgaagtttcttctgtggaaggaacactatgcaaaacagctatcccatacaaaaggaaatatttatcagataaccacattttaatatcagcattggtgattgctagcacggtaattttgacagttttgggagcaatcatttggttcctgtacaaaaaacattctgattctcgtttcaccacagttttttcaaccgcaccccaatcaccttataatgaagactgtgttttggtagttggagaagaaaatgaatatcctgttcaatttgactaagtttttggtaatcttgcactaagacatcaacaaaatgccctggcagagataacttgggaaagattttaatataaaacttgacattggatattagagctttaatggtattccttattccagtaacatttttatgtactcatctgctgtgaaaagtctttaggttcattaaaaaaacaggttttagaaatgatcttagatctaatatagtgattttaagcatcccgtcaaaggcagaatctgtcacttgaatgaaggaaagcttaaagcccaagcagataaaaataaaagcccagcctatttgtcttgcctgctgtatcttccctatttagttgacccactttagtttatatgtttattagtaaacatgaaatggggaataagtgattttaagtacatcccatacatttaaatatctttgataattgttatttttttggcagataattcctctagaatgtgtatctttttatgatttagatgaagaaaattttacaacttttaacaccccacaccaattttagtttcattacttttacacacaccattttatcacaaatgactcaagttttaatgaatgtttataaattatttgaaacaaaatatgatcgctgtgtccaggatggcatagagaaagctggcaattaggttaacacttacatattatagtgcccctttaaggatttctctcttgccaccataccttttgtactttcccctatacaagatgtatctcattctcctcaagcatttataaatttttccttcaatgacatgaaaactgtgcaagcaaaaaccgaagaaaaacacttaagtacaactgtagtgacagtgatcaaagttttcagtgcatttattgtacattttaagaaaaaggtgaaaatcatttggggagtaaaaaaatgaaaaagctgaaacgagtaattttcctcaccatcaataaaccaaaaacaggaaagataaagaatgtataaatttcacgtaaattagtcacgtatcacttatcaatggggatacgttctaagaaatgcatagttagggaatcttgtgtgaaaatcagcttgtatttacacaaacccagatggtagagcctattttgtcccaaacctacacagcatgttactgtgctgaatactgcagacaattgtaacacaatatttgtgtatctaaatatagaaaaggtacagtaaaaatatggtctactaaggaaacactgttctatatgtggtccattactgactgaagtatactgtctagaagtctgaggctcaaagaaaagtaatccctcttctgaatccacaccccatcaattatcttactttcttctggggagatagatagatatactatctcactagcttgactaatggcaacaaagttccagcttgtgtagtctctttttattgaccacatgaatcgaaaacactcatcacaattaatggcactatcattaatgagacatgagtaactaaaaagtgatagaaaactattaacagtgcggctacatggtactgaaaatgcaggcattacaccagctgttacacaagcacaagcatgctctgtaagagctttacatttctgagattttgtatagtgattgagatgtctattttattattgatagactattactaatgtcaatattgaacactaccctggaattcctgcctggttttcctacccaaattgtaccactccttgaagaactacaggcacagtaaaaaaaatatggcgtattatgtgaactaaaagagttctaaaggagttcttaaaggagtggtagaatttgggtaggaaagtgattaagtccaacttaaaaccaacagtctcaaacgtctacaactacaatgtccaatgagccactagccacatgaggctatttaagtaaatttagtttaaaatccagttttcgaattacattagccacattgtcaagtgttcaaatcacaggtggttagtggctactgtactgggcaacatacattatagaacattttcattataggaagttttattgggcagtgctgctcttaaatcctaccttccactcaactcccatacaactttcttttgtacattttgatactttctacctaatggcagctcttccaaaatagctgctttaaactctgatttaattttcaatatttggtttcatttttcaacaggccaagaggcctctggtaatgaagtgctatatatatatatatgatggagtctcactgtgctgcccaggctacagtgcagtggctcgatcttggctctctccaatctccgccttgcaggttttcaagcaattctcctgcctcagcctccttagtagctgggaccacagacatctgtcaccacacccagctaactttttgtatttttggtagagacggggtttcgccatattgactgggctggtctcaaactcctgacctcaagtgatccacccaccttggtctcccaaagtgctgggattacatgcgtgagccaccacacttggcctacattttttctttatataccagaacatctataacaggcaccttatctactcattagtgaagagataattggattacacaggcaggcttgtttactacatccagaatgtagaaactgctttcttcaacatcttggttctagctagtaataacaatataattctttggcagatattcagaataacattttaaactacattttcttagaaaattgcattcttgtagtgagcagtgtatggtctcttttgttcagaatttaaaactgataaccaatgaaagccttttctcttattcctctaccgtcatttacatgataatctgaagctaatatgacaatatttaaatactaagtggtactagggaactacaagaatactgtaaagcttaagccattgttatcactgtcatttagcatttaataacaaaactatacagaattatgtgcataccaatgaatgttttgtaccatctagttaaattttttaaataaagttttatgggttaagcagaagacaactgtcatactgaattttattaaaagtatatatacttcaaattcaaagcatcccttaggacccacagaatatattaaaactaccacccttaaattttatatttttgctttaagacagacaatgcaaaggtaactggcaagaggtgagcaaatgttttagaacatttatattattgcttaaaatgagatttgaaattgtaataaaattcttggttatgaa

SEQ ID NO: 41 - DNA, 5622 bp, Homo sapiens
  source 1..5622: mol_type = genomic DNA
atgaggacaggctgggcgacccctcgccgcccggcggggctcctcatgctgctcttctggttcttcgatctcgcggagccctctggccgcgcagctaatgaccccttcaccatcgtccatggaaatacgggcaagtgcatcaagccagtgtatggctggatagtagcagacgactgtgatgaaactgaggacaagttatggaagtgggtgtcccagcatcggctctttcatttgcactcccaaaagtgccttggcctcgatattaccaaatcggtaaatgagctgagaatgttcagctgtgactccagtgccatgctgtggtggaaatgtgagcaccactctctgtacggagctgcccggtaccggctggctctgaaggatggacatggcacagcaatctcaaatgcatctgatgtctggaagaaaggaggctcagaggaaagcctttgtgaccagccttatcatgagatctataccagagatgggaactcttatgggagaccttgtgaatttccattcttaattgatgggacctggcatcatgattgcattcttgatgaagatcatagtgggccatggtgtgccaccaccttaaattatgaatatgaccgaaagtggggcatctgcttaaagcctgaaaacggttgtgaagataattgggaaaagaacgagcagtttggaagttgctaccaatttaatactcagacggctctttcttggaaagaagcttatgtttcatgtcagaatcaaggagctgatttactgagcatcaacagtgctgctgaattaacttaccttaaagaaaaagaaggcattgctaagattttctggattggtttaaatcagctatactctgctagaggctgggaatggtcagaccacaaaccattaaactttctcaactgggatccagacaggcccagtgcacctactataggtggctccagctgtgcaagaatggatgctgagtctggtctgtggcagagcttttcctgtgaagctcaactgccctatgtctgcaggaaaccattaaataatacagtggagttaacagatgtctggacatactcagatacccgctgtgatgcaggctggctgccaaataatggattttgctatctgctggtaaatgaaagtaattcctgggataaggcacatgcgaaatgcaaagccttcagtagtgacctaatcagcattcattctctagcagatgtggaggtggttgtcacaaaactccataatgaggatatcaaagaagaagtgtggataggccttaagaacataaacataccaactttatttcagtggtcagatggtactgaagttactctaacatattgggatgagaatgagccaaatgttccctacaataagacgcccaactgtgtttcctacttaggagagctaggtcagtggaaagtccaatcatgtgaggagaaactaaaatatgtatgcaagagaaagggagaaaaactgaatgacgcaagttctgataagatgtgtcctccagatgagggctggaagagacatggagaaacctgttacaagatttatgaggatgaggtcccttttggaacaaactgcaatctgactatcactagcagatttgagcaagaatacctaaatgatttgatgaaaaagtatgataaatctctaagaaaatacttctggactggcctgagagatgtagattcttgtggagagtataactgggcaactgttggtggaagaaggcgggctgtaaccttttccaactggaattttcttgagccagcttccccgggcggctgcgtggctatgtctactggaaagtctgttggaaagtgggaggtgaaggactgcagaagcttcaaagcactttcaatttgcaagaaaatgagtggaccccttgggcctgaagaagcatcccctaagcctgatgacccctgtcctgaaggctggcagagtttccccgcaagtctttcttgttataaggtattccatgcagaaagaattgtaagaaagaggaactgggaagaagctgaacgattctgccaagcccttggagcacacctttctagcttcagccatgtggatgaaataaaggaatttcttcactttttaacggaccagttcagtggccagcattggctgtggattggtttgaataaaaggagcccagatttacaaggatcctggcaatggagtgatcgtacaccagtgtctactattatcatgccaaatgagtttcagcaggattatgacatcagagactgtgctgctgtcaaggtatttcataggccatggcgaagaggctggcatttctatgatgatagagaatttatttatttgaggccttttgcttgtgatacaaaacttgaatgggtgtgccaaattccaaaaggccgtactccaaaaacaccagactggtacaatccagaccgtgctggaattcatggacctccacttataattgaaggaagtgaatattggtttgttgctgatcttcacctaaactatgaagaagccgtcctgtactgtgccagcaatcacagctttcttgcgactataacatcttttgtgggactaaaagccatcaaaaacaaaatagcaaatatatctggtgatggacagaagtggtggataagaattagcgagtggccaatagatgatcattttacatactcacgatatccatggcaccgctttcctgtgacatttggagaggaatgcttgtacatgtctgccaagacttggcttatcgacttaggtaaaccaacagactgtagtaccaagttgcccttcatctgtgaaaaatataatgtttcttcgttagagaaatacagcccagattctgcagctaaagtgcaatgttctgagcaatggattccttttcagaataagtgttttctaaagatcaaacccgtgtctctcacattttctcaagcaagcgatacctgtcactcctatggtggcacccttccttcagtgttgagccagattgaacaagactttattacatccttgcttccggatatggaagctactttatggattggtttgcgctggactgcctatgaaaagataaacaaatggacagataacagagagctgacgtacagtaactttcacccattattggttagtgggaggctgagaataccagaaaatttttttgaggaagagtctcgctaccactgtgccctaatactcaacctccaaaaatcaccgtttactgggacgtggaattttacatcctgcagtgaacgccactttgtgtctctctgtcagaaatattcagaagttaaaagcagacagacgttgcagaatgcttcagaaactgtaaagtatctaaataatctgtacaaaataatcccaaagactctgacttggcacagtgctaaaagggagtgtctgaaaagtaacatgcagctggtgagcatcacggacccttaccagcaggcattcctcagtgtgcaggcgctccttcacaactcttccttatggatcggactcttcagtcaagatgatgaactcaactttggttggtcagatgggaaacgtcttcattttagtcgctgggctgaaactaatgggcaactcgaagactgtgtagtattagacactgatggattctggaaaacagttgattgcaatgacaatcaaccaggtgctatttgctactattcaggaaatgagactgaaaaagaggtcaaaccagttgacagtgttaaatgtccatctcctgttctaaatactctgtggataccatttcagaactgttgctacaatttcataataacaaagaataggcatatggcaacaacacaggatgaagttcatactaaatgccagaaactgaatccaaaatcacatattctgagtattcgagatgaaaaggagaataactttgttcttgagcaactgctgtacttcaattatatggcttcatgggtcatgttaggaataacttatagaaataattctcttatgtggtttgataagaccccactgtcatatacacattggagagcaggaagaccaactataaaaaatgagaagtttttggctggtttaagtactgacggcttctgggatattcaaacctttaaagttattgaagaagcagtttattttcaccagcacagcattcttgcttgtaaaattgaaatggttgactacaaagaagaacataatactacactgccacagtttatgccatatgaagatggtatttacagtgttattcaaaaaaaggtaacatggtatgaagcattaaacatgtgttctcaaagtggaggtcacttggcaagcgttcacaaccaaaatggccagctctttctggaagatattgtaaaacgtgatggatttccactatgggttgggctctcaagtcatgatggaagtgaatcaagttttgaatggtctgatggtagtacatttgactatatcccatggaaaggccaaacatctcctggaaattgtgttctcttggatccaaaaggaacttggaaacatgaaaaatgcaactctgttaaggatggtgctatttgttataaacctacaaaatctaaaaagctgtcccgtcttacatattcatcaagatgtccagcagcaaaagagaatgggtcacggtggatccagtacaagggtcactgttacaagtctgatcaggcattgcacagtttttcagaggccaaaaaattgtgttcaaaacatgatcactctgcaactatcgtttccataaaagatgaagatgagaataaatttgtgagcagactgatgagggaaaataataacattaccatgagagtttggcttggattatctcaacattctgttgaccagtcttggagttggttagatggatcagaagtgacatttgtcaaatgggaaaataaaagtaagagtggtgttggaagatgtagcatgttgatagcttcaaatgaaacttggaaaaaagttgaatgtgaacatggttttggaagagttgtctgcaaagtgcctctggactgtccttcatctacttggattcagttccaagacagttgttacatttttctccaagaagccatcaaagtagaaagcatagaggatgtcagaaatcagtgtactgaccatggagcggacatgataagcatacataatgaagaagaaaatgcttttatactggatactttgaaaaagcaatggaaaggcccagatgatatcctactaggcatgttttatgacacagatgatgcgagtttcaagtggtttgataattcaaatatgacatttgataagtggacagaccaagatgatgatgaggatttagttgacacctgtgcttttctgcacatcaagacaggtgaatggaaaaaaggaaattgtgaagtttcttctgtggaaggaacactatgcaaaacagctatcccatacaaaaggaaatatttatcagataaccacattttaatatcagcattggtgattgctagcacggtaattttgacagttttgggagcaatcatttggttcctgtacaaaaaacattctgattctcgtttcaccacagttttttcaaccgcaccccaatcaccttataatgaagactgtgttttggtagttggagaagaaaatgaatatcctgttcaatttgactaa

SEQ ID NO: 42 - DNA, 5454 bp, Homo sapiens
  source 1..5454: mol_type = genomic DNA
atgaggacaggctgggcgacccctcgccgcccggcggggctcctcatgctgctcttctggttcttcgatctcgcggagccctctggccgcgcagctaatgaccccttcaccatcgtccatggaaatacgggcaagtgcatcaagccagtgtatggctggatagtagcagacgactgtgatgaaactgaggacaagttatggaagtgggtgtcccagcatcggctctttcatttgcactcccaaaagtgccttggcctcgatattaccaaatcggtaaatgagctgagaatgttcagctgtgactccagtgccatgctgtggtggaaatgtgagcaccactctctgtacggagctgcccggtaccggctggctctgaaggatggacatggcacagcaatctcaaatgcatctgatgtctggaagaaaggaggctcagaggaaagcctttgtgaccagccttatcatgagatctataccagagatgggaactcttatgggagaccttgtgaatttccattcttaattgatgggacctggcatcatgattgcattcttgatgaagatcatagtgggccatggtgtgccaccaccttaaattatgaatatgaccgaaagtggggcatctgcttaaagcctgaaaacggttgtgaagataattgggaaaagaacgagcagtttggaagttgctaccaatttaatactcagacggctctttcttggaaagaagcttatgtttcatgtcagaatcaaggagctgatttactgagcatcaacagtgctgctgaattaacttaccttaaagaaaaagaaggcattgctaagattttctggattggtttaaatcagctatactctgctagaggctgggaatggtcagaccacaaaccattaaactttctcaactgggatccagacaggcccagtgcacctactataggtggctccagctgtgcaagaatggatgctgagtctggtctgtggcagagcttttcctgtgaagctcaactgccctatgtctgcaggaaaccattaaataatacagtggagttaacagatgtctggacatactcagatacccgctgtgatgcaggctggctgccaaataatggattttgctatctgctggtaaatgaaagtaattcctgggataaggcacatgcgaaatgcaaagccttcagtagtgacctaatcagcattcattctctagcagatgtggaggtggttgtcacaaaactccataatgaggatatcaaagaagaagtgtggataggccttaagaacataaacataccaactttatttcagtggtcagatggtactgaagttactctaacatattgggatgagaatgagccaaatgttccctacaataagacgcccaactgtgtttcctacttaggagagctaggtcagtggaaagtccaatcatgtgaggagaaactaaaatatgtatgcaagagaaagggagaaaaactgaatgacgcaagttctgataagatgtgtcctccagatgagggctggaagagacatggagaaacctgttacaagatttatgaggatgaggtcccttttggaacaaactgcaatctgactatcactagcagatttgagcaagaatacctaaatgatttgatgaaaaagtatgataaatctctaagaaaatacttctggactggcctgagagatgtagattcttgtggagagtataactgggcaactgttggtggaagaaggcgggctgtaaccttttccaactggaattttcttgagccagcttccccgggcggctgcgtggctatgtctactggaaagtctgttggaaagtgggaggtgaaggactgcagaagcttcaaagcactttcaatttgcaagaaaatgagtggaccccttgggcctgaagaagcatcccctaagcctgatgacccctgtcctgaaggctggcagagtttccccgcaagtctttcttgttataaggtattccatgcagaaagaattgtaagaaagaggaactgggaagaagctgaacgattctgccaagcccttggagcacacctttctagcttcagccatgtggatgaaataaaggaatttcttcactttttaacggaccagttcagtggccagcattggctgtggattggtttgaataaaaggagcccagatttacaaggatcctggcaatggagtgatcgtacaccagtgtctactattatcatgccaaatgagtttcagcaggattatgacatcagagactgtgctgctgtcaaggtatttcataggccatggcgaagaggctggcatttctatgatgatagagaatttatttatttgaggccttttgcttgtgatacaaaacttgaatgggtgtgccaaattccaaaaggccgtactccaaaaacaccagactggtacaatccagaccgtgctggaattcatggacctccacttataattgaaggaagtgaatattggtttgttgctgatcttcacctaaactatgaagaagccgtcctgtactgtgccagcaatcacagctttcttgcgactataacatcttttgtgggactaaaagccatcaaaaacaaaatagcaaatatatctggtgatggacagaagtggtggataagaattagcgagtggccaatagatgatcattttacatactcacgatatccatggcaccgctttcctgtgacatttggagaggaatgcttgtacatgtctgccaagacttggcttatcgacttaggtaaaccaacagactgtagtaccaagttgcccttcatctgtgaaaaatataatgtttcttcgttagagaaatacagcccagattctgcagctaaagtgcaatgttctgagcaatggattccttttcagaataagtgttttctaaagatcaaacccgtgtctctcacattttctcaagcaagcgatacctgtcactcctatggtggcacccttccttcagtgttgagccagattgaacaagactttattacatccttgcttccggatatggaagctactttatggattggtttgcgctggactgcctatgaaaagataaacaaatggacagataacagagagctgacgtacagtaactttcacccattattggttagtgggaggctgagaataccagaaaatttttttgaggaagagtctcgctaccactgtgccctaatactcaacctccaaaaatcaccgtttactgggacgtggaattttacatcctgcagtgaacgccactttgtgtctctctgtcagaaatattcagaagttaaaagcagacagacgttgcagaatgcttcagaaactgtaaagtatctaaataatctgtacaaaataatcccaaagactctgacttggcacagtgctaaaagggagtgtctgaaaagtaacatgcagctggtgagcatcacggacccttaccagcaggcattcctcagtgtgcaggcgctccttcacaactcttccttatggatcggactcttcagtcaagatgatgaactcaactttggttggtcagatgggaaacgtcttcattttagtcgctgggctgaaactaatgggcaactcgaagactgtgtagtattagacactgatggattctggaaaacagttgattgcaatgacaatcaaccaggtgctatttgctactattcaggaaatgagactgaaaaagaggtcaaaccagttgacagtgttaaatgtccatctcctgttctaaatactctgtggataccatttcagaactgttgctacaatttcataataacaaagaataggcatatggcaacaacacaggatgaagttcatactaaatgccagaaactgaatccaaaatcacatattctgagtattcgagatgaaaaggagaataactttgttcttgagcaactgctgtacttcaattatatggcttcatgggtcatgttaggaataacttatagaaataattctcttatgtggtttgataagaccccactgtcatatacacattggagagcaggaagaccaactataaaaaatgagaagtttttggctggtttaagtactgacggcttctgggatattcaaacctttaaagttattgaagaagcagtttattttcaccagcacagcattcttgcttgtaaaattgaaatggttgactacaaagaagaacataatactacactgccacagtttatgccatatgaagatggtatttacagtgttattcaaaaaaaggtaacatggtatgaagcattaaacatgtgttctcaaagtggaggtcacttggcaagcgttcacaaccaaaatggccagctctttctggaagatattgtaaaacgtgatggatttccactatgggttgggctctcaagtcatgatggaagtgaatcaagttttgaatggtctgatggtagtacatttgactatatcccatggaaaggccaaacatctcctggaaattgtgttctcttggatccaaaaggaacttggaaacatgaaaaatgcaactctgttaaggatggtgctatttgttataaacctacaaaatctaaaaagctgtcccgtcttacatattcatcaagatgtccagcagcaaaagagaatgggtcacggtggatccagtacaagggtcactgttacaagtctgatcaggcattgcacagtttttcagaggccaaaaaattgtgttcaaaacatgatcactctgcaactatcgtttccataaaagatgaagatgagaataaatttgtgagcagactgatgagggaaaataataacattaccatgagagtttggcttggattatctcaacattctgttgactgtccttcatctacttggattcagttccaagacagttgttacatttttctccaagaagccatcaaagtagaaagcatagaggatgtcagaaatcagtgtactgaccatggagcggacatgataagcatacataatgaagaagaaaatgcttttatactggatactttgaaaaagcaatggaaaggcccagatgatatcctactaggcatgttttatgacacagatgatgcgagtttcaagtggtttgataattcaaatatgacatttgataagtggacagaccaagatgatgatgaggatttagttgacacctgtgcttttctgcacatcaagacaggtgaatggaaaaaaggaaattgtgaagtttcttctgtggaaggaacactatgcaaaacagctatcccatacaaaaggaaatatttatcagataaccacattttaatatcagcattggtgattgctagcacggtaattttgacagttttgggagcaatcatttggttcctgtacaaaaaacattctgattctcgtttcaccacagttttttcaaccgcaccccaatcaccttataatgaagactgtgttttggtagttggagaagaaaatgaatatcctgttcaatttgactaa

SEQ ID NO: 43 - DNA, 5713 bp, Homo sapiens
  source 1..5713: mol_type = genomic DNA
gataaggcacatgcgaaatgcaaagccttcagtagtgacctaatcagcattcattctctagcagatgtggaggtggttgtcacaaaactccataatgaggatatcaaagaagaagtgtggataggccttaagaacataaacataccaactttatttcagtggtcagatggtactgaagttactctaacatattgggatgagaatgagccaaatgttccctacaataagacgcccaactgtgtttcctacttaggagagctaggtcagtggaaagtccaatcatgtgaggagaaactaaaatatgtatgcaagagaaagggagaaaaactgaatgacgcaagttctgataagatgtgtcctccagatgagggctggaagagacatggagaaacctgttacaagatttatgaggatgaggtcccttttggaacaaactgcaatctgactatcactagcagatttgagcaagaatacctaaatgatttgatgaaaaagtatgataaatctctaagaaaatacttctggactggcctgagagatgtagattcttgtggagagtataactgggcaactgttggtggaagaaggcgggctgtaaccttttccaactggaattttcttgagccagcttccccgggcggctgcgtggctatgtctactggaaagtctgttggaaagtgggaggtgaaggactgcagaagcttcaaagcactttcaatttgcaagaaaatgagtggaccccttgggcctgaagaagcatcccctaagcctgatgacccctgtcctgaaggctggcagagtttccccgcaagtctttcttgttataaggtattccatgcagaaagaattgtaagaaagaggaactgggaagaagctgaacgattctgccaagcccttggagcacacctttctagcttcagccatgtggatgaaataaaggaatttcttcactttttaacggaccagttcagtggccagcattggctgtggattggtttgaataaaaggagcccagatttacaaggatcctggcaatggagtgatcgtacaccagtgtctactattatcatgccaaatgagtttcagcaggattatgacatcagagactgtgctgctgtcaaggtatttcataggccatggcgaagaggctggcatttctatgatgatagagaatttatttatttgaggccttttgcttgtgatacaaaacttgaatgggtgtgccaaattccaaaaggccgtactccaaaaacaccagactggtacaatccagagcgtgctggaattcatggacctccacttataattgaaggaagtgaatattggtttgttgctgatcttcacctaaactatgaagaagccgtcctgtactgtgccagcaatcacagctttcttgcaactataacatcttttgtgggactaaaagccatcaaaaacaaaatagcaaatatatctggtgatggacagaagtggtggataagaattagcgagtggccaatagatgatcattttacatactcacgatatccatggcaccgctttcctgtgacatttggagaggaatgcttgtacatgtctgccaagacttggcttatcgacttaggtaaaccaacagactgtagtaccaagttgcccttcatctgtgaaaaatataatgtttcttcgttagagaaatacagcccagattctgcagctaaagtgcaatgttctgagcaatggattccttttcagaataagtgttttctaaagatcaaacccgtgtctctcacattttctcaagcaagcgatacctgtcactcctatggtggcacccttccttcagtgttgagccagattgaacaagactttattacatccttgcttccggatatggaagctactttatggattggtttgcgctggactgcctatgaaaagataaacaaatggacagataacagagagctgacgtacagtaactttcacccattattggttagtgggaggctgagaataccagaaaatttttttgaggaagagtctcgctaccactgtgccctaatactcaacctccaaaaatcaccgtttactgggacgtggaattttacatcctgcagtgaacgccactttgtgtctctctgtcagaaatattcagaagttaaaagcagacagacgttgcagaatgcttcagaaactgtaaagtatctaaataatctgtacaaaataatcccaaagactctgacttggcacagtgctaaaagggagtgtctgaaaagtaacatgcagctggtgagcatcacggacccttaccagcaggcattcctcagtgtgcaggcgctccttcacaactcttccttatggatcggactcttcagtcaagatgatgaactcaactttggttggtcagatgggaaacgtcttcattttagtcgctgggctgaaactaatgggcaactcgaagactgtgtagtattagacactgatggattctggaaaacagttgattgcaatgacaatcaaccaggtgctatttgctactattcaggaaatgagactgaaaaagaggtcaaaccagttgacagtgttaaatgtccatctcctgttctaaatactctgtggataccatttcagaactgttgctacaatttcataataacaaagaataggcatatggcaacaacacaggatgaagttcatactaaatgccagaaactgaatccaaaatcacatattctgagtattcgagatgaaaaggagaataactttgttcttgagcaactgctgtacttcaattatatggcttcatgggtcatgttaggaataacttatagaaataattctcttatgtggtttgataagaccccactgtcatatacacattggagagcaggaagaccaactataaaaaatgagaagtttttggctggtttaagtactgacggcttctgggatattcaaacctttaaagttattgaagaagcagtttattttcaccagcacagcattcttgcttgtaaaattgaaatggttgactacaaagaagaatataatactacactgccacagtttatgccatatgaagatggtatttacagtgttattcaaaaaaaggtaacatggtatgaagcattaaacatgtgttctcaaagtggaggtcacttggcaagcgttcacaaccaaaatggccagctctttctggaagatattgtaaaacgtgatggatttccactatgggttgggctctcaagtcatgatggaagtgaatcaagttttgaatggtctgatggtagtacatttgactatatcccatggaaaggccaaacatctcctggaaattgtgttctcttggatccaaaaggaacttggaaacatgaaaaatgcaactctgttaaggatggtgctatttgttataaacctacaaaatctaaaaagctgtcccgtcttacatattcatcaagatgtccagcagcaaaagagaatgggtcacggtggatccagtacaagggtcactgttacaagtctgatcaggcattgcacagtttttcagaggccaaaaaattgtgttcaaaacatgatcactctgcaactatcgtttccataaaagatgaagatgagaataaatttgtgagcagactgatgagggaaaataataacattaccatgagagtttggcttggattatctcaacattctgttgaccagtcttggagttggttagatggatcagaagtgacatttgtcaaatgggaaaataaaagtaagagtggtgttggaagatgtagcatgttgatagcttcaaatgaaacttggaaaaaagttgaatgtgaacatggttttggaagagttgtctgcaaagtgcctctgggccctgattacacagcaatagctatcatagttgccacactaagtatcttagttctcatgggcggactgatttggttcctcttccaaaggcaccgtttgcacctggcgggtttctcatcagttcgatatgcacaaggagtgaatgaagatgagattatgcttccttctttccatgactaaattcttctaaaagttttctaatttgcactaatgtgttatgagaaattagtcacttaaaatgtcccagtgtcagtatttactctgctccaaagtagaactcttaaatactttttcagttgtttagatcttaggcatgtgctggtatccacagttaattccctgctaaatgccatgtttatcaccctaattaatagaatggaggggactccaaagctggaactgaagtccaaattgtttgtacagtaatatgtttaatgttcattttctctgtatgaatgtgattggtaactaggatatgtatattttaatagaatttttaacaaaacttcttagaaaattaaaataggcatattactaggtgacatgtctactttttaatttttaagagcatccggccaaatgcaaaattagtacctcaaagtaaaaattgaactgtaaactctatcagcattgtttcaaaatagtcatttttagcactggggaaaaataaacaataagacatgcttactttttaatttttatttttttgagactgagtctctctctgttgcccaggctggagtacaatggcgtgatctcggctcactgcaaatctccgcctcccaggttcaagcgattctcctgcctcagcctcctgagtagctgggattacaggcaactgccaccatgcccggctaatttttgtatttttagtagagatggggtttcaccatgttggccaggctggtctcgaactcgtgaccgcaggtgatcctcccgcctcggcctcccaaagtgctgggattacaggcatgagccaccgcgcctggcctctgcttactttttatatagcaaaatgattcctcttggcaagatgtttcttatattattccaaagttatttcataccattattatgtaaatatgaagagtttttttctgtttataattgtttataaaacaatgacttttaaagatttagtgcttaacattttcccaagtgtgggaacattatttttagattgagtaggtaccttgtagcagtgtgctttgcattttctgatgtattacatgactgtttcttttgtaaagagaatcaactaggtatttaagactgataattttacaatttatatgcttcacatagcatgtcaacttttgactaagaattttgttttacttttttaacatgtgttaaacagagaaagggtccatgaaggaaagtgtatgagttgcatttgtaaaaatgagactttttcagtggaactctaaaccttgtgatgactactaacaaatgtaaaattatgagtgattaagaaaacattgctttgtggttatcactttaagttttgacacctagattatagtcttagtaatagcatccactggaaaaggtgaaaatgttttattcagcatttaacttacatttgtactttagagtatttttgtataaaatccatagatttattttacatttagagtatttacactatgataaagttgtaaataattttctaagacagtttttatatagtctacagttgtcctgatttcttattgaatttgttagactagttctcttgtcctgtgatctgtgtacaattttagtcactaagactttcctccaagaactaagccaacttgatgtgaaaagcacagctgtatataatggtgatgtcataataaagttgttttatcttttaagtaaaagt

SEQ ID NO: 44 - DNA, 6928 bp, Homo sapiens
  source 1..6928: mol_type = genomic DNA
ggcgggagcgcgtgcgcccgaggacccggccggaaggcttgcgccagctcaggatgaggacaggctgggcgacccctcgccgcccggcggggctcctcatgctgctcttctggttcttcgatctcgcggagccctctggccgcgcagctaatgaccccttcaccatcgtccatggaaatacgggcaagtgcatcaagccagtgtatggctggatagtagcagacgactgtgatgaaactgaggacaagttatggaagtgggtgtcccagcatcggctctttcatttgcactcccaaaagtgccttggcctcgatattaccaaatcggtaaatgagctgagaatgttcagctgtgactccagtgccatgctgtggtggaaatgtgagcaccactctctgtacggagctgcccggtaccggctggctctgaaggatggacatggcacagcaatctcaaatgcatctgatgtctggaagaaaggaggctcagaggaaagcctttgtgaccagccttatcatgagatctataccagagatgggaactcttatgggagaccttgtgaatttccattcttaattgatgggacctggcatcatgattgcattcttgatgaagatcatagtgggccatggtgtgccaccaccttaaattatgaatatgaccgaaagtggggcatctgcttaaagcctgaaaacggttgtgaagataattgggaaaagaacgagcagtttggaagttgctaccaatttaatactcagacggctctttcttggaaagaagcttatgtttcatgtcagaatcaaggagctgatttactgagcatcaacagtgctgctgaattaacttaccttaaagaaaaagaaggcattgctaagattttctggattggtttaaatcagctatactctgctagaggctgggaatggtcagaccacaaaccattaaactttctcaactgggatccagacaggcccagtgcacctactataggtggctccagctgtgcaagaatggatgctgagtctggtctgtggcagagcttttcctgtgaagctcaactgccctatgtctgcaggaaaccattaaataatacagtggagttaacagatgtctggacatactcagatacccgctgtgatgcaggctggctgccaaataatggattttgctatctgctggtaaatgaaagtaattcctgggataaggcacatgcgaaatgcaaagccttcagtagtgacctaatcagcattcattctctagcagatgtggaggtggttgtcacaaaactccataatgaggatatcaaagaagaagtgtggataggccttaagaacataaacataccaactttatttcagtggtcagatggtactgaagttactctaacatattgggatgagaatgagccaaatgttccctacaataagacgcccaactgtgtttcctacttaggagagctaggtcagtggaaagtccaatcatgtgaggagaaactaaaatatgtatgcaagagaaagggagaaaaactgaatgacgcaagttctgataagatgtgtcctccagatgagggctggaagagacatggagaaacctgttacaagatttatgaggatgaggtcccttttggaacaaactgcaatctgactatcactagcagatttgagcaagaatacctaaatgatttgatgaaaaagtatgataaatctctaagaaaatacttctggactggcctgagagatgtagattcttgtggagagtataactgggcaactgttggtggaagaaggcgggctgtaaccttttccaactggaattttcttgagccagcttccccgggcggctgcgtggctatgtctactggaaagtctgttggaaagtgggaggtgaaggactgcagaagcttcaaagcactttcaatttgcaagaaaatgagtggaccccttgggcctgaagaagcatcccctaagcctgatgacccctgtcctgaaggctggcagagtttccccgcaagtctttcttgttataaggtattccatgcagaaagaattgtaagaaagaggaactgggaagaagctgaacgattctgccaagcccttggagcacacctttctagcttcagccatgtggatgaaataaaggaatttcttcactttttaacggaccagttcagtggccagcattggctgtggattggtttgaataaaaggagcccagatttacaaggatcctggcaatggagtgatcgtacaccagtgtctactattatcatgccaaatgagtttcagcaggattatgacatcagagactgtgctgctgtcaaggtatttcataggccatggcgaagaggctggcatttctatgatgatagagaatttatttatttgaggccttttgcttgtgatacaaaacttgaatgggtgtgccaaattccaaaaggccgtactccaaaaacaccagactggtacaatccagaccgtgctggaattcatggacctccacttataattgaaggaagtgaatattggtttgttgctgatcttcacctaaactatgaagaagccgtcctgtactgtgccagcaatcacagctttcttgcgactataacatcttttgtgggactaaaagccatcaaaaacaaaatagcaaatatatctggtgatggacagaagtggtggataagaattagcgagtggccaatagatgatcattttacatactcacgatatccatggcaccgctttcctgtgacatttggagaggaatgcttgtacatgtctgccaagacttggcttatcgacttaggtaaaccaacagactgtagtaccaagttgcccttcatctgtgaaaaatataatgtttcttcgttagagaaatacagcccagattctgcagctaaagtgcaatgttctgagcaatggattccttttcagaataagtgttttctaaagatcaaacccgtgtctctcacattttctcaagcaagcgatacctgtcactcctatggtggcacccttccttcagtgttgagccagattgaacaagactttattacatccttgcttccggatatggaagctactttatggattggtttgcgctggactgcctatgaaaagataaacaaatggacagataacagagagctgacgtacagtaactttcacccattattggttagtgggaggctgagaataccagaaaatttttttgaggaagagtctcgctaccactgtgccctaatactcaacctccaaaaatcaccgtttactgggacgtggaattttacatcctgcagtgaacgccactttgtgtctctctgtcagaaatattcagaagttaaaagcagacagacgttgcagaatgcttcagaaactgtaaagtatctaaataatctgtacaaaataatcccaaagactctgacttggcacagtgctaaaagggagtgtctgaaaagtaacatgcagctggtgagcatcacggacccttaccagcaggcattcctcagtgtgcaggcgctccttcacaactcttccttatggatcggactcttcagtcaagatgatgaactcaactttggttggtcagatgggaaacgtcttcattttagtcgctgggctgaaactaatgggcaactcgaagactgtgtagtattagacactgatggattctggaaaacagttgattgcaatgacaatcaaccaggtgctatttgctactattcaggaaatgagactgaaaaagaggtcaaaccagttgacagtgttaaatgtccatctcctgttctaaatactctgtggataccatttcagaactgttgctacaatttcataataacaaagaataggcatatggcaacaacacaggatgaagttcatactaaatgccagaaactgaatccaaaatcacatattctgagtattcgagatgaaaaggagaataactttgttcttgagcaactgctgtacttcaattatatggcttcatgggtcatgttaggaataacttatagaaataattctcttatgtggtttgataagaccccactgtcatatacacattggagagcaggaagaccaactataaaaaatgagaagtttttggctggtttaagtactgacggcttctgggatattcaaacctttaaagttattgaagaagcagtttattttcaccagcacagcattcttgcttgtaaaattgaaatggttgactacaaagaagaacataatactacactgccacagtttatgccatatgaagatggtatttacagtgttattcaaaaaaaggtaacatggtatgaagcattaaacatgtgttctcaaagtggaggtcacttggcaagcgttcacaaccaaaatggccagctctttctggaagatattgtaaaacgtgatggatttccactatgggttgggctctcaagtcatgatggaagtgaatcaagttttgaatggtctgatggtagtacatttgactatatcccatggaaaggccaaacatctcctggaaattgtgttctcttggatccaaaaggaacttggaaacatgaaaaatgcaactctgttaaggatggtgctatttgttataaacctacaaaatctaaaaagctgtcccgtcttacatattcatcaagatgtccagcagcaaaagagaatgggtcacggtggatccagtacaagggtcactgttacaagtctgatcaggcattgcacagtttttcagaggccaaaaaattgtgttcaaaacatgatcactctgcaactatcgtttccataaaagatgaagatgagaataaatttgtgagcagactgatgagggaaaataataacattaccatgagagtttggcttggattatctcaacattctgttgaccagtcttggagttggttagatggatcagaagtgacatttgtcaaatgggaaaataaaagtaagagtggtgttggaagatgtagcatgttgatagcttcaaatgaaacttggaaaaaagttgaatgtgaacatggttttggaagagttgtctgcaaagtgcctctgggccctgattacacagcaatagctatcatagttgccacactaagtatcttagttctcatgggcggactgatttggttcctcttccaaaggcaccgtttgcacctggcgggtttctcatcagttcgatatgcacaaggagtgaatgaagatgagattatgcttccttctttccatgactaaattcttctaaaagttttctaatttgcactaatgtggttatggagaaattagtcacttaaaatgtcccagtgtcagtatttactctgctccaaagtagaactcttaaatactttttcagttgtttagatcttaggcatgtgctggtatccacagttaattccctgctaaatgccatgtttatcaccctaattaatagaatggaggggactccaaagctggaactgaagtccaaattgtttgtacagtaatatgtttaatgttcattttctctgtatgaatgtgattggtaactaggatatgtatattttaatagaatttttaacaaaacttcttagaaaattaaaataggcatattactaggtgacatgtctactttttaatttttaagagcatccggccaaatgcaaaattagtacctcaaagtaaaaattgaactgtaaactctatcagcattgtttcaaaatagtcatttttagcactggggaaaaataaacaataagacatgcttactttttaatttttatttttttgagactgagtctctctctgttgcccaggctggagtacaatggcgtgatctcggctcactgcaaatctccgcctcccaggttcaagcgattctcctgcctcagcctcctgagtagctgggattacaggcaactgccaccatgcccggctaatttttgtatttttagtagagatggggtttcaccatgttggccaggctggtctcgaactcgtgaccgcagtgatcctcccgcctcggcctcccaaagtgctgggattacaggcatgagccaccgcgcctggcctctgcttactttttatatagcaaaatgattccccttggcaagatgtttcttatattattccaaagttatttcataccattattatgtaaatatgaagagtttttttctgtttataattgtttataaaacaatgacttttaaagatttagtgcttaacattttcccaagtgtgggaacattatttttagattgagtaggtaccttgtagcagtgtgctttgcattttctgatgtattacatgactgtttcttttgtaaagagaatcaactaggtatttaagactgataattttacaatttatatgcttcacatagcatgtcaacttttgactaagaattttgttttacttttttaacatgtgttaaacagagaaagggtccatgaaggaaagtgtatgagttgcatttgtaaaaatgagactttttcagtggaactctaaaccttgtgatgactactaacaaatgtaaaattatgagtgattaagaaaacattgctttgtggttatcactttaagttttgacacctagattatagtcttagtaatagcatccactggaaaaggtgaaaatgttttattcagcatttaacttacatttgtactttagagtatttttgtataaaatccatagatttattttacatttagagtatttacactatgataaagttgtaaataattttctaagacagtttttatatagtctacagttgtcctgatttcttattgaatttgttagactagttctcttgtcttgtgatctgtgtacaattttagtcactaagactttcctccaagaactaagccaacttgatgtgaaaagcacggctgtatataatggtgatgtcataataaagttgttttatcttttaagtaaaaaaaaaaaaaaaaaaaaa

SEQ ID NO: 45 - DNA, 5169 bp, Homo sapiens
  source 1..5169: mol_type = genomic DNA
atgaggacaggctgggcgacccctcgccgcccggcggggctcctcatgctgctcttctggttcttcgatctcgcggagccctctggccgcgcagctaatgaccccttcaccatcgtccatggaaatacgggcaagtgcatcaagccagtgtatggctggatagtagcagacgactgtgatgaaactgaggacaagttatggaagtgggtgtcccagcatcggctctttcatttgcactcccaaaagtgccttggcctcgatattaccaaatcggtaaatgagctgagaatgttcagctgtgactccagtgccatgctgtggtggaaatgtgagcaccactctctgtacggagctgcccggtaccggctggctctgaaggatggacatggcacagcaatctcaaatgcatctgatgtctggaagaaaggaggctcagaggaaagcctttgtgaccagccttatcatgagatctataccagagatgggaactcttatgggagaccttgtgaatttccattcttaattgatgggacctggcatcatgattgcattcttgatgaagatcatagtgggccatggtgtgccaccaccttaaattatgaatatgaccgaaagtggggcatctgcttaaagcctgaaaacggttgtgaagataattgggaaaagaacgagcagtttggaagttgctaccaatttaatactcagacggctctttcttggaaagaagcttatgtttcatgtcagaatcaaggagctgatttactgagcatcaacagtgctgctgaattaacttaccttaaagataaagaaggcattgctaagattttctggattggtttaaatcagctatactctgctagaggctgggaatggtcagaccacaaaccattaaactttctcaactgggatccagacaggcccagtgcacctactataggtggctccagctgtgcaagaatggatgctgagtctggtctgtggcagagcttttcctgtgaagctcaactgccctatgtctgcaggaaaccattaaataatacagtggagttaacagatgtctggacatactcagatacccgctgtgatgcaggctggctgccaaataatggattttgctatctgctggtaaatgaaagtaattcctgggataaggcacatgcgaaatgcaaagccttcagtagtgacctaatcagcattcattctctagcagatgtggaggtggttgtcacaaaactccataatgaggatatcaaagaagaagtgtggataggccttaagaacataaacataccaactttatttcagtggtcagatggtactgaagttactctaacatattgggatgagaatgagccaaatgttccctacaataagacgcccaactgtgtttcctacttaggagagctaggtcagtggaaagtccaatcatgtgaggagaaactaaaatatgtatgcaagagaaagggagaaaaactgaatgacgcaagttctgataagatgtgtcctccagatgagggctggaagagacatggagaaacctgttacaagatttatgaggatgaggtcccttttggaacaaactgcaatctgactatcactagcagatttgagcaagaatacctaaatgatttgatgaaaaagtatgataaatctctaagaaaatacttctggactggcctgagagatgtagattcttgtggagagtataactgggcaactgttggtggaagaaggcgggctgtaaccttttccaactggaattttcttgagccagcttccccgggcggctgcgttgctatgtcaactggaaagtctgttggaaagtgggaggtgaaggactgcagaagcttcaaagcactttcaatttgcaagaaaatgagtggaccccttgggcctgaagaagcatcccctaagcctgatgacccctgtcctgaaggctggcagagtttccccgcaagtctttcttgttataaggtatttcatgcagaaagaattgtaagaaagaggaactgggaagaagctgaacgattctgccaagcccttggagcacacctttctagcttcagccatgtggatgaaataaaggaatttcttcactttttaacggaccagttcagtggccagcattggctgtggattggtttgaataaaaggagcccagatttacaaggatcttggcaatggagtgatcgtacaccagtgtctactattatcatgccaaatgagtttcagcaggattatgacatcagagactgtgctgctgtcaaggtatttcataggccatggcgaagaggctggcatttctatgatgatagagaatttatttatttgaggccttttgcttgtgatacaaaacttgaatgggtgtgccaaattccaaaaggccgtactccaaaaacaccagactggtacaatccagagcgtgctggaattcatggacctccacttataattgaaggaagtgaatattggtttgttgctgatcttcacctaaactatgaagaagccgtcctgtactgtgccagcaatcacagctttcttgcaactataacatcttttgtgggactaaaagccatcaaaaacaaaatagcaaatatatctggtgatggacagaagtggtggataagaattagcgagtggccaatagatgatcattttacatactcacgatatccatggcaccgctttcctgtgacatttggagaggaatgcttgtacatgtctgccaagacttggcttatcgacttaggtaaaccaacagactgtagtaccaagttgcccttcatctgtgaaaaatataatgtttcttcgttagagaaatacagcccagattctgcagctaaagtgcaatgttctgagcaatggattccttttcagaataagtgttttctaaagatcaaacccgtgtctctcacattttctcaagcaagcgatacctgtcactcctatggtggcacccttccttcagtgttgagccagattgaacaagactttattacatccttgcttccggatatggaagctactttatggattggtttgcgctggactgcctatgaaaagataaacaaatggacagataacagagagctgacgtacagtaactttcacccattattggttagtgggaggctgagaataccagaaaatttttttgaggaagagtctcgctaccactgtgccctaatactcaacctccaaaaatcaccgtttactgggacgtggaattttacatcctgcagtgaacgccactttgtgtctctctgtcagaaatattcagaagttaaaagcagacagacgttgcagaatgcttcagaaactgtaaagtatctaaataatctgtacaaaataatcccaaagactctgacttggcacagtgctaaaagggagtgtctgaaaagtaacatgcagctggtgagcatcacggacccttaccagcaggcattcctcagtgtgcaggcgctccttcacaactcttccttatggatcggactcttcagtcaagatgatgaactcaactttggttggtcagatgggaaacgtcttcattttagtcgctgggctgaaactaatgggcaactcgaagactgtgtagtattagacactgatggattctggaaaacagttgattgcaatgacaatcaaccaggtgctatttgctactattcaggaaatgagactgaaaaagaggtcaaaccagttgacagtgttaaatgtccatctcctgttctaaatactctgtggataccatttcagaactgttgctacaatttcataataacaaagaataggcatatggcaacaacacaggatgaagttcatactaaatgccagaaactgaatccaaaatcacatattctgagtattcgagatgaaaaggagaataactttgttcttgagcaactgctgtacttcaattatatggcttcatgggtcatgttaggaataacttatagaaataagtctcttatgtggtttgataagaccccactgtcatatacacattggagagcaggaagaccaactataaaaaatgagaagtttttggctggtttaagtactgacggcttctgggatattcaaacctttaaagttattgaagaagcagtttattttcaccagcacagcattcttgcttgtaaaattgaaatggttgactacaaagaagaatataatactacactgccacagtttatgccatatgaagatggtatttacagtgttattcaaaaaaaggtaacatggtatgaagcattaaacatgtgttctcaaagtggaggtcacttggcaagcgttcacaaccaaaatggccagctctttctggaagatattgtaaaacgtgatggatttccactatgggttgggctctcaagtcatgatggaagtgaatcaagttttgaatggtctgatggtagtacatttgactatatcccatggaaaggccaaacatctcctggaaattgtgttctcttggatccaaaaggaacttggaaacatgaaaaatgcaactctgttaaggatggtgctatttgttataaacctacaaaatctaaaaagctgtcccgtcttacatattcatcaagatgtccagcagcaaaagagaatgggtcacggtggatccagtacaagggtcactgttacaagtctgatcaggcattgcacagtttttcagaggccaaaaaattgtgttcaaaacatgatcactctgcaactatcgtttccataaaagatgaagatgagaataaatttgtgagcagactgatgagggaaaataataacattaccatgagagtttggcttggattatctcaacattctgttgaccagtcttggagttggttagatggatcagaagtgacatttgtcaaatgggaaaataaaagtaagagtggtgttggaagatgtagcatgttgatagcttcaaatgaaacttggaaaaaagttgaatgtgaacatggttttggaagagttgtctgcaaagtgcctctgggccctgattacacagcaatagctatcatagttgccacactaagtatcttagttctcatgggcggactgatttggttcctcttccaaaggcaccgtttgcacctggcgggtttctcatcagttcgatatgcacaaggagtgaatgaagatgagattatgcttccttctttccatgactaa

SEQ ID NO: 46 - DNA, 6886 bp, Homo sapiens
  source 1..6886: mol_type = genomic DNA
ccggccggaaggcttgcgccagctcaggatgaggacaggctgggcgacccctcgccgcccggcggggctcctcatgctgctcttctggttcttcgatctcgcggagccctctggccgcgcagctaatgaccccttcaccatcgtccatggaaatacgggcaagtgcatcaagccagtgtatggctggatagtagcagacgactgtgatgaaactgaggacaagttatggaagtgggtgtcccagcatcggctctttcatttgcactcccaaaagtgccttggcctcgatattaccaaatcggtaaatgagctgagaatgttcagctgtgactccagtgccatgctgtggtggaaatgtgagcaccactctctgtacggagctgcccggtaccggctggctctgaaggatggacatggcacagcaatctcaaatgcatctgatgtctggaagaaaggaggctcagaggaaagcctttgtgaccagccttatcatgagatctataccagagatgggaactcttatgggagaccttgtgaatttccattcttaattgatgggacctggcatcatgattgcattcttgatgaagatcatagtgggccatggtgtgccaccaccttaaattatgaatatgaccgaaagtggggcatctgcttaaagcctgaaaacggttgtgaagataattgggaaaagaacgagcagtttggaagttgctaccaatttaatactcagacggctctttcttggaaagaagcttatgtttcatgtcagaatcaaggagctgatttactgagcatcaacagtgctgctgaattaacttaccttaaagaaaaagaaggcattgctaagattttctggattggtttaaatcagctatactctgctagaggctgggaatggtcagaccacaaaccattaaactttctcaactgggatccagacaggcccagtgcacctactataggtggctccagctgtgcaagaatggatgctgagtctggtctgtggcagagcttttcctgtgaagctcaactgccctatgtctgcaggaaaccattaaataatacagtggagttaacagatgtctggacatactcagatacccgctgtgatgcaggctggctgccaaataatggattttgctatctgctggtaaatgaaagtaattcctgggataaggcacatgcgaaatgcaaagccttcagtagtgacctaatcagcattcattctctagcagatgtggaggtggttgtcacaaaactccataatgaggatatcaaagaagaagtgtggataggccttaagaacataaacataccaactttatttcagtggtcagatggtactgaagttactctaacatattgggatgagaatgagccaaatgttccctacaataagacgcccaactgtgtttcctacttaggagagctaggtcagtggaaagtccaatcatgtgaggagaaactaaaatatgtatgcaagagaaagggagaaaaactgaatgacgcaagttctgataagatgtgtcctccagatgagggctggaagagacatggagaaacctgttacaagatttatgaggatgaggtcccttttggaacaaactgcaatctgactatcactagcagatttgagcaagaatacctaaatgatttgatgaaaaagtatgataaatctctaagaaaatacttctggactggcctgagagatgtagattcttgtggagagtataactgggcaactgttggtggaagaaggcgggctgtaaccttttccaactggaattttcttgagccagcttccccgggcggctgcgtggctatgtctactggaaagtctgttggaaagtgggaggtgaaggactgcagaagcttcaaagcactttcaatttgcaagaaaatgagtggaccccttgggcctgaagaagcatcccctaagcctgatgacccctgtcctgaaggctggcagagtttccccgcaagtctttcttgttataaggtattccatgcagaaagaattgtaagaaagaggaactgggaagaagctgaacgattctgccaagcccttggagcacacctttctagcttcagccatgtggatgaaataaaggaatttcttcactttttaacggaccagttcagtggccagcattggctgtggattggtttgaataaaaggagcccagatttacaaggatcctggcaatggagtgatcgtacaccagtgtctactattatcatgccaaatgagtttcagcaggattatgacatcagagactgtgctgctgtcaaggtatttcataggccatggcgaagaggctggcatttctatgatgatagagaatttatttatttgaggccttttgcttgtgatacaaaacttgaatgggtgtgccaaattccaaaaggccgtactccaaaaacaccagactggtacaatccagaccgtgctggaattcatggacctccacttataattgaaggaagtgaatattggtttgttgctgatcttcacctaaactatgaagaagccgtcctgtactgtgccagcaatcacagctttcttgcaactataacatcttttgtgggactaaaagccatcaaaaacaaaatagcaaatatatctggtgatggacagaagtggtggataagaattagcgagtggccaatagatgatcattttacatactcacgatatccatggcaccgctttcctgtgacatttggagaggaatgcttgtacatgtctgccaagacttggcttatcgacttaggtaaaccaacagactgtagtaccaagttgcccttcatctgtgaaaaatataatgtttcttcgttagagaaatacagcccagattctgcagctaaagtgcaatgttctgagcaatggattccttttcagaataagtgttttctaaagatcaaacccgtgtctctcacattttctcaagcaagcgatacctgtcactcctatggtggcacccttccttcagtgttgagccagattgaacaagactttattacatccttgcttccggatatggaagctactttatggattggtttgcgctggactgcctatgaaaagataaacaaatggacagataacagagagctgacgtacagtaactttcacccattattggttagtgggaggctgagaataccagaaaatttttttgaggaagagtctcgctaccactgtgccctaatactcaacctccaaaaatcaccgtttactgggacgtggaattttacatcctgcagtgaacgccactttgtgtctctctgtcagaaatattcagaagttaaaagcagacagacgttgcagaatgcttcagaaactgtaaagtatctaaataatctgtacaaaataatcccaaagactctgacttggcacagtgctaaaagggagtgtctgaaaagtaacatgcagctggtgagcatcacggacccttaccagcaggcattcctcagtgtgcaggcgctccttcacaactcttccttatggatcggactcttcagtcaagatgatgaactcaactttggttggtcagatgggaaacgtcttcattttagtcgctgggctgaaactaatgggcaactcgaagactgtgtagtattagacactgatggattctggaaaacagttgattgcaatgacaatcaaccaggtgctatttgctactattcaggaaatgagactgaaaaagaggtcaaaccagttgacagtgttaaatgtccatctcctgttctaaatactctgtggataccatttcagaactgttgctacaatttcataataacaaagaataggcatatggcaacaacacaggatgaagttcatactaaatgccagaaactgaatccaaaatcacatattctgagtattcgagatgaaaaggagaataactttgttcttgagcaactgctgtacttcaattatatggcttcatgggtcatgttaggaataacttatagaaataagtctcttatgtggtttgataagaccccactgtcatatacacattggagagcaggaagaccaactataaaaaatgagaagtttttggctggtttaagtactgacggcttctgggatattcaaacctttaaagttattgaagaagcagtttattttcaccagcacagcattcttgcttgtaaaattgaaatggttgactacaaagaagaatataatactacactgccacagtttatgccatatgaagatggtatttacagtgttattcaaaaaaaggtaacatggtatgaagcattaaacatgtgttctcaaagtggaggtcacttggcaagcgttcacaaccaaaatggccagctctttctggaagatattgtaaaacgtgatggatttccactatgggttgggctctcaagtcatgatggaagtgaatcaagttttgaatggtctgatggtagtacatttgactatatcccatggaaaggccaaacatctcctggaaattgtgttctcttggatccaaaaggaacttggaaacatgaaaaatgcaactctgttaaggatggtgctatttgttataaacctacaaaatctaaaaagctgtcccgtcttacatattcatcaagatgtccagcagcaaaagagaatgggtcacggtggatccagtacaagggtcactgttacaagtctgatcaggcattgcacagtttttcagaggccaaaaaattgtgttcaaaacatgatcactctgcaactatcgtttccataaaagatgaagatgagaataaatttgtgagcagactgatgagggaaaataataacattaccatgagagtttggcttggattatctcaacattctgttgaccagtcttggagttggttagatggatcagaagtgacatttgtcaaatgggaaaataaaagtaagagtggtgttggaagatgtagcatgttgatagcttcaaatgaaacttggaaaaaagttgaatgtgaacatggttttggaagagttgtctgcaaagtgcctctgggccctgattacacagcaatagctatcatagttgccacactaagtatcttagttctcatgggcggactgatttggttcctcttccaaaggcaccgtttgcacctggcgggtttctcatcagttcgatatgcacaaggagtgaatgaagatgagattatgcttccttctttccatgactaaattcttctaaaagttttctaatttgcactaatgtgttatgagaaattagtcacttaaaatgtcccagtgtcagtatttactctgctccaaagtagaactcttaaatactttttcagttgtttagatcttaggcatgtgctggtatccacagttaattccctgctaaatgccatgtttatcaccctaattaatagaatggaggggactccaaagctggaactgaagtccaaattgtttgtacagtaatatgtttaatgttcattttctctgtatgaatgtgattggtaactaggatatgtatattttaatagaatttttaacaaaacttcttagaaaattaaaataggcatattactaggtgacatgtctactttttaatttttaagagcatccggccaaatgcaaaattagtacctcaaagtaaaaattgaactgtaaactctatcagcattgtttcaaaatagtcatttttagcactggggaaaaataaacaataagacatgcttactttttaatttttatttttttgagactgagtctctctctgttgcccaggctggagtacaatggcgtgatctcggctcactgcaaatctccgcctcccaggttcaagcgattctcctgcctcagcctcctgagtagctgggattacaggcaactgccaccatgcccggctaatttttgtatttttagtagagatggggtttcaccatgttggccaggctggtctcgaactcgtgaccgcaggtgatcctcccgcctcggcctcccaaagtgctgggattacaggcatgagccaccgcgcctggcctctgcttactttttatatagcaaaatgattcctcttggcaagatgtttcttatattattccaaagttatttcataccattattatgtaaatatgaagagtttttttctgtttataattgtttataaaacaatgacttttaaagatttagtgcttaacattttcccaagtgtgggaacattatttttagattgagtaggtaccttgtagcagtgtgctttgcattttctgatgtattacatgactgtttcttttgtaaagagaatcaactaggtatttaagactgataattttacaatttatatgcttcacatagcatgtcaacttttgactaagaattttgttttacttttttaacatgtgttaaacagagaaagggtccatgaaggaaagtgtatgagttgcatttgtaaaaatgagactttttcagtggaactctaaaccttgtgatgactactaacaaatgtaaaattatgagtgattaagaaaacattgctttgtggttatcactttaagttttgacacctagattatagtcttagtaatagcatccactggaaaaggtgaaaatgttttattcggcatttaacttacatttgtactttatttttgtataaaatccatagatttattttacatttagagtatttacactatgataaagttgtaaataattttctaagacagtttttatatagtctacagttgtcctgatttcttattgaatttgttagactagttctcttgtcctgtgatctgtgtacaattttagtcactaagactttcctccaagaactaagccaacttgatgtgaaaagcacagctgtatataatggtgatgtcataataaagttgttttatcttttaagtaaaagtaaaa

SEQ ID NO: 47 - protein, 1722 aa, Homo sapiens
MRTGWATPRRPAGLLMLLFWFFDLAEPSGRAANDPFTIVHGNTGKCIKPVYGWIVADDCDETEDKLWKWVSQHRLFHLHSQKCLGLDITKSVNELRMFSCDSSAMLWWKCEHHSLYGAARYRLALKDGHGTAISNASDVWKKGGSEESLCDQPYHEIYTRDGNSYGRPCEFPFLIDGTWHHDCILDEDHSGPWCATTLNYEYDRKWGICLKPENGCEDNWEKNEQFGSCYQFNTQTALSWKEAYVSCQNQGADLLSINSAAELTYLKEKEGIAKIFWIGLNQLYSARGWEWSDHKPLNFLNWDPDRPSAPTIGGSSCARMDAESGLWQSFSCEAQLPYVCRKPLNNTVELTDVWTYSDTRCDAGWLPNNGFCYLLVNESNSWDKAHAKCKAFSSDLISIHSLADVEVVVTKLHNEDIKEEVWIGLKNINIPTLFQWSDGTEVTLTYWDENEPNVPYNKTPNCVSYLGELGQWKVQSCEEKLKYVCKRKGEKLNDASSDKMCPPDEGWKRHGETCYKIYEDEVPFGTNCNLTITSRFEQEYLNDLMKKYDKSLRKYFWTGLRDVDSCGEYNWATVGGRRRAVTFSNWNFLEPASPGGCVAMSTGKSVGKWEVKDCRSFKALSICKKMSGPLGPEEASPKPDDPCPEGWQSFPASLSCYKVFHAERIVRKRNWEEAERFCQALGAHLSSFSHVDEIKEFLHFLTDQFSGQHWLWIGLNKRSPDLQGSWQWSDRTPVSTIIMPNEFQQDYDIRDCAAVKVFHRPWRRGWHFYDDREFIYLRPFACDTKLEWVCQIPKGRTPKTPDWYNPDRAGIHGPPLIIEGSEYWFVADLHLNYEEAVLYCASNHSFLATITSFVGLKAIKNKIANISGDGQKWWIRISEWPIDDHFTYSRYPWHRFPVTFGEECLYMSAKTWLIDLGKPTDCSTKLPFICEKYNVSSLEKYSPDSAAKVQCSEQWIPFQNKCFLKIKPVSLTFSQASDTCHSYGGTLPSVLSQIEQDFITSLLPDMEATLWIGLRWTAYEKINKWTDNRELTYSNFHPLLVSGRLRIPENFFEEESRYHCALILNLQKSPFTGTWNFTSCSERHFVSLCQKYSEVKSRQTLQNASETVKYLNNLYKIIPKTLTWHSAKRECLKSNMQLVSITDPYQQAFLSVQALLHNSSLWIGLFSQDDELNFGWSDGKRLHFSRWAETNGQLEDCVVLDTDGFWKTVDCNDNQPGAICYYSGNETEKEVKPVDSVKCPSPVLNTPWIPFQNCCYNFIITKNRHMATTQDEVHTKCQKLNPKSHILSIRDEKENNFVLEQLLYFNYMASWVMLGITYRNKSLMWFDKTPLSYTHWRAGRPTIKNEKFLAGLSTDGFWDIQTFKVIEEAVYFHQHSILACKIEMVDYKEEYNTTLPQFMPYEDGIYSVIQKKVTWYEALNMCSQSGGHLASVHNQNGQLFLEDIVKRDGFPLWVGLSSHDGSESSFEWSDGSTFDYIPWKGQTSPGNCVLLDPKGTWKHEKCNSVKDGAICYKPTKSKKLSRLTYSSRCPAAKENGSRWIQYKGHCYKSDQALHSFSEAKKLCSKHDHSATIVSIKDEDENKFVSRLMRENNNITMRVWLGLSQHSVDQSWSWLDGSEVTFVKWENKSKSGVGRCSMLIASNETWKKVECEHGFGRVVCKVPLGPDYTAIAIIVATLSILVLMGGLIWFLFQRHRLHLAGFSSVRYAQGVNEDEIMLPSFHD

SEQ ID NO: 48 - protein, 1873 aa, Homo sapiens
MRTGWATPRRPAGLLMLLFWFFDLAEPSGRAANDPFTIVHGNTGKCIKPVYGWIVADDCDETEDKLWKWVSQHRLFHLHSQKCLGLDITKSVNELRMFSCDSSAMLWWKCEHHSLYGAARYRLALKDGHGTAISNASDVWKKGGSEESLCDQPYHEIYTRDGNSYGRPCEFPFLIDGTWHHDCILDEDHSGPWCATTLNYEYDRKWGICLKPENGCEDNWEKNEQFGSCYQFNTQTALSWKEAYVSCQNQGADLLSINSAAELTYLKEKEGIAKIFWIGLNQLYSARGWEWSDHKPLNFLNWDPDRPSAPTIGGSSCARMDAESGLWQSFSCEAQLPYVCRKPLNNTVELTDVWTYSDTRCDAGWLPNNGFCYLLVNESNSWDKAHAKCKAFSSDLISIHSLADVEVVVTKLHNEDIKEEVWIGLKNINIPTLFQWSDGTEVTLTYWDENEPNVPYNKTPNCVSYLGELGQWKVQSCEEKLKYVCKRKGEKLNDASSDKMCPPDEGWKRHGETCYKIYEDEVPFGTNCNLTITSRFEQEYLNDLMKKYDKSLRKYFWTGLRDVDSCGEYNWATVGGRRRAVTFSNWNFLEPASPGGCVAMSTGKSVGKWEVKDCRSFKALSICKKMSGPLGPEEASPKPDDPCPEGWQSFPASLSCYKVFHAERIVRKRNWEEAERFCQALGAHLSSFSHVDEIKEFLHFLTDQFSGQHWLWIGLNKRSPDLQGSWQWSDRTPVSTIIMPNEFQQDYDIRDCAAVKVFHRPWRRGWHFYDDREFIYLRPFACDTKLEWVCQIPKGRTPKTPDWYNPDRAGIHGPPLIIEGSEYWFVADLHLNYEEAVLYCASNHSFLATITSFVGLKAIKNKIANISGDGQKWWIRISEWPIDDHFTYSRYPWHRFPVTFGEECLYMSAKTWLIDLGKPTDCSTKLPFICEKYNVSSLEKYSPDSAAKVQCSEQWIPFQNKCFLKIKPVSLTFSQASDTCHSYGGTLPSVLSQIEQDFITSLLPDMEATLWIGLRWTAYEKINKWTDNRELTYSNFHPLLVSGRLRIPENFFEEESRYHCALILNLQKSPFTGTWNFTSCSERHFVSLCQKYSEVKSRQTLQNASETVKYLNNLYKIIPKTLTWHSAKRECLKSNMQLVSITDPYQQAFLSVQALLHNSSLWIGLFSQDDELNFGWSDGKRLHFSRWAETNGQLEDCVVLDTDGFWKTVDCNDNQPGAICYYSGNETEKEVKPVDSVKCPSPVLNTPWIPFQNCCYNFIITKNRHMATTQDEVHTKCQKLNPKSHILSIRDEKENNFVLEQLLYFNYMASWVMLGITYRNKSLMWFDKTPLSYTHWRAGRPTIKNEKFLAGLSTDGFWDIQTFKVIEEAVYFHQHSILACKIEMVDYKEEYNTTLPQFMPYEDGIYSVIQKKVTWYEALNMCSQSGGHLASVHNQNGQLFLEDIVKRDGFPLWVGLSSHDGSESSFEWSDGSTFDYIPWKGQTSPGNCVLLDPKGTWKHEKCNSVKDGAICYKPTKSKKLSRLTYSSRCPAAKENGSRWIQYKGHCYKSDQALHSFSEAKKLCSKHDHSATIVSIKDEDENKFVSRLMRENNNITMRVWLGLSQHSVDQSWSWLDGSEVTFVKWENKSKSGVGRCSMLIASNETWKKVECEHGFGRVVCKVPLDCPSSTWIQFQDSCYIFLQEAIKVESIEDVRNQCTDHGADMISIHNEEENAFILDTLKKQWKGPDDILLGMFYDTDDASFKWFDNSNMTFDKWTDQDDDEDLVDTCAFLHIKTGEWKKGNCEVSSVEGTLCKTAIPYKRKYLSDNHILISALVIASTVILTVLGAIIWFLYKKHSDSRFTTVFSTAPQSPYNEDCVLVVGEENEYPVQFD

SEQ ID NO: 49 - protein, 1817 aa, Homo sapiens
MRTGWATPRRPAGLLMLLFWFFDLAEPSGRAANDPFTIVHGNTGKCIKPVYGWIVADDCDETEDKLWKWVSQHRLFHLHSQKCLGLDITKSVNELRMFSCDSSAMLWWKCEHHSLYGAARYRLALKDGHGTAISNASDVWKKGGSEESLCDQPYHEIYTRDGNSYGRPCEFPFLIDGTWHHDCILDEDHSGPWCATTLNYEYDRKWGICLKPENGCEDNWEKNEQFGSCYQFNTQTALSWKEAYVSCQNQGADLLSINSAAELTYLKEKEGIAKIFWIGLNQLYSARGWEWSDHKPLNFLNWDPDRPSAPTIGGSSCARMDAESGLWQSFSCEAQLPYVCRKPLNNTVELTDVWTYSDTRCDAGWLPNNGFCYLLVNESNSWDKAHAKCKAFSSDLISIHSLADVEVVVTKLHNEDIKEEVWIGLKNINIPTLFQWSDGTEVTLTYWDENEPNVPYNKTPNCVSYLGELGQWKVQSCEEKLKYVCKRKGEKLNDASSDKMCPPDEGWKRHGETCYKIYEDEVPFGTNCNLTITSRFEQEYLNDLMKKYDKSLRKYFWTGLRDVDSCGEYNWATVGGRRRAVTFSNWNFLEPASPGGCVAMSTGKSVGKWEVKDCRSFKALSICKKMSGPLGPEEASPKPDDPCPEGWQSFPASLSCYKVFHAERIVRKRNWEEAERFCQALGAHLSSFSHVDEIKEFLHFLTDQFSGQHWLWIGLNKRSPDLQGSWQWSDRTPVSTIIMPNEFQQDYDIRDCAAVKVFHRPWRRGWHFYDDREFIYLRPFACDTKLEWVCQIPKGRTPKTPDWYNPDRAGIHGPPLIIEGSEYWFVADLHLNYEEAVLYCASNHSFLATITSFVGLKAIKNKIANISGDGQKWWIRISEWPIDDHFTYSRYPWHRFPVTFGEECLYMSAKTWLIDLGKPTDCSTKLPFICEKYNVSSLEKYSPDSAAKVQCSEQWIPFQNKCFLKIKPVSLTFSQASDTCHSYGGTLPSVLSQIEQDFITSLLPDMEATLWIGLRWTAYEKINKWTDNRELTYSNFHPLLVSGRLRIPENFFEEESRYHCALILNLQKSPFTGTWNFTSCSERHFVSLCQKYSEVKSRQTLQNASETVKYLNNLYKIIPKTLTWHSAKRECLKSNMQLVSITDPYQQAFLSVQALLHNSSLWIGLFSQDDELNFGWSDGKRLHFSRWAETNGQLEDCVVLDTDGFWKTVDCNDNQPGAICYYSGNETEKEVKPVDSVKCPSPVLNTPWIPFQNCCYNFIITKNRHMATTQDEVHTKCQKLNPKSHILSIRDEKENNFVLEQLLYFNYMASWVMLGITYRNKSLMWFDKTPLSYTHWRAGRPTIKNEKFLAGLSTDGFWDIQTFKVIEEAVYFHQHSILACKIEMVDYKEEYNTTLPQFMPYEDGIYSVIQKKVTWYEALNMCSQSGGHLASVHNQNGQLFLEDIVKRDGFPLWVGLSSHDGSESSFEWSDGSTFDYIPWKGQTSPGNCVLLDPKGTWKHEKCNSVKDGAICYKPTKSKKLSRLTYSSRCPAAKENGSRWIQYKGHCYKSDQALHSFSEAKKLCSKHDHSATIVSIKDEDENKFVSRLMRENNNITMRVWLGLSQHSVDCPSSTWIQFQDSCYIFLQEAIKVESIEDVRNQCTDHGADMISIHNEEENAFILDTLKKQWKGPDDILLGMFYDTDDASFKWFDNSNMTFDKWTDQDDDEDLVDTCAFLHIKTGEWKKGNCEVSSVEGTLCKTAIPYKRKYLSDNHILISALVIASTVILTVLGAIIWFLYKKHSDSRFTTVFSTAPQSPYNEDCVLVVGEENEYPVQFD

SEQ ID NO: 50 - protein, 1340 aa, Homo sapiens
DKAHAKCKAFSSDLISIHSLADVEVVVTKLHNEDIKEEVWIGLKNINIPTLFQWSDGTEVTLTYWDENEPNVPYNKTPNCVSYLGELGQWKVQSCEEKLKYVCKRKGEKLNDASSDKMCPPDEGWKRHGETCYKIYEDEVPFGTNCNLTITSRFEQEYLNDLMKKYDKSLRKYFWTGLRDVDSCGEYNWATVGGRRRAVTFSNWNFLEPASPGGCVAMSTGKSVGKWEVKDCRSFKALSICKKMSGPLGPEEASPKPDDPCPEGWQSFPASLSCYKVFHAERIVRKRNWEEAERFCQALGAHLSSFSHVDEIKEFLHFLTDQFSGQHWLWIGLNKRSPDLQGSWQWSDRTPVSTIIMPNEFQQDYDIRDCAAVKVFHRPWRRGWHFYDDREFIYLRPFACDTKLEWVCQIPKGRTPKTPDWYNPERAGIHGPPLIIEGSEYWFVADLHLNYEEAVLYCASNHSFLATITSFVGLKAIKNKIANISGDGQKWWIRISEWPIDDHFTYSRYPWHRFPVTFGEECLYMSAKTWLIDLGKPTDCSTKLPFICEKYNVSSLEKYSPDSAAKVQCSEQWIPFQNKCFLKIKPVSLTFSQASDTCHSYGGTLPSVLSQIEQDFITSLLPDMEATLWIGLRWTAYEKINKWTDNRELTYSNFHPLLVSGRLRIPENFFEEESRYHCALILNLQKSPFTGTWNFTSCSERHFVSLCQKYSEVKSRQTLQNASETVKYLNNLYKIIPKTLTWHSAKRECLKSNMQLVSITDPYQQAFLSVQALLHNSSLWIGLFSQDDELNFGWSDGKRLHFSRWAETNGQLEDCVVLDTDGFWKTVDCNDNQPGAICYYSGNETEKEVKPVDSVKCPSPVLNTPWIPFQNCCYNFIITKNRHMATTQDEVHTKCQKLNPKSHILSIRDEKENNFVLEQLLYFNYMASWVMLGITYRNNSLMWFDKTPLSYTHWRAGRPTIKNEKFLAGLSTDGFWDIQTFKVIEEAVYFHQHSILACKIEMVDYKEEYNTTLPQFMPYEDGIYSVIQKKVTWYEALNMCSQSGGHLASVHNQNGQLFLEDIVKRDGFPLWVGLSSHDGSESSFEWSDGSTFDYIPWKGQTSPGNCVLLDPKGTWKHEKCNSVKDGAICYKPTKSKKLSRLTYSSRCPAAKENGSRWIQYKGHCYKSDQALHSFSEAKKLCSKHDHSATIVSIKDEDENKFVSRLMRENNNITMRVWLGLSQHSVDQSWSWLDGSEVTFVKWENKSKSGVGRCSMLIASNETWKKVECEHGFGRVVCKVPLGPDYTAIAIIVATLSILVLMGGLIWFLFQRHRLHLAGFSSVRYAQGVNEDEIMLPSFHD

SEQ ID NO: 51 - protein, 1722 aa, Homo sapiens
MRTGWATPRRPAGLLMLLFWFFDLAEPSGRAANDPFTIVHGNTGKCIKPVYGWIVADDCDETEDKLWKWVSQHRLFHLHSQKCLGLDITKSVNELRMFSCDSSAMLWWKCEHHSLYGAARYRLALKDGHGTAISNASDVWKKGGSEESLCDQPYHEIYTRDGNSYGRPCEFPFLIDGTWHHDCILDEDHSGPWCATTLNYEYDRKWGICLKPENGCEDNWEKNEQFGSCYQFNTQTALSWKEAYVSCQNQGADLLSINSAAELTYLKEKEGIAKIFWIGLNQLYSARGWEWSDHKPLNFLNWDPDRPSAPTIGGSSCARMDAESGLWQSFSCEAQLPYVCRKPLNNTVELTDVWTYSDTRCDAGWLPNNGFCYLLVNESNSWDKAHAKCKAFSSDLISIHSLADVEVVVTKLHNEDIKEEVWIGLKNINIPTLFQWSDGTEVTLTYWDENEPNVPYNKTPNCVSYLGELGQWKVQSCEEKLKYVCKRKGEKLNDASSDKMCPPDEGWKRHGETCYKIYEDEVPFGTNCNLTITSRFEQEYLNDLMKKYDKSLRKYFWTGLRDVDSCGEYNWATVGGRRRAVTFSNWNFLEPASPGGCVAMSTGKSVGKWEVKDCRSFKALSICKKMSGPLGPEEASPKPDDPCPEGWQSFPASLSCYKVFHAERIVRKRNWEEAERFCQALGAHLSSFSHVDEIKEFLHFLTDQFSGQHWLWIGLNKRSPDLQGSWQWSDRTPVSTIIMPNEFQQDYDIRDCAAVKVFHRPWRRGWHFYDDREFIYLRPFACDTKLEWVCQIPKGRTPKTPDWYNPDRAGIHGPPLIIEGSEYWFVADLHLNYEEAVLYCASNHSFLATITSFVGLKAIKNKIANISGDGQKWWIRISEWPIDDHFTYSRYPWHRFPVTFGEECLYMSAKTWLIDLGKPTDCSTKLPFICEKYNVSSLEKYSPDSAAKVQCSEQWIPFQNKCFLKIKPVSLTFSQASDTCHSYGGTLPSVLSQIEQDFITSLLPDMEATLWIGLRWTAYEKINKWTDNRELTYSNFHPLLVSGRLRIPENFFEEESRYHCALILNLQKSPFTGTWNFTSCSERHFVSLCQKYSEVKSRQTLQNASETVKYLNNLYKIIPKTLTWHSAKRECLKSNMQLVSITDPYQQAFLSVQALLHNSSLWIGLFSQDDELNFGWSDGKRLHFSRWAETNGQLEDCVVLDTDGFWKTVDCNDNQPGAICYYSGNETEKEVKPVDSVKCPSPVLNTLWIPFQNCCYNFIITKNRHMATTQDEVHTKCQKLNPKSHILSIRDEKENNFVLEQLLYFNYMASWVMLGITYRNKSLMWFDKTPLSYTHWRAGRPTIKNEKFLAGLSTDGFWDIQTFKVIEEAVYFHQHSILACKIEMVDYKEEYNTTLPQFMPYEDGIYSVIQKKVTWYEALNMCSQSGGHLASVHNQNGQLFLEDIVKRDGFPLWVGLSSHDGSESSFEWSDGSTFDYIPWKGQTSPGNCVLLDPKGTWKHEKCNSVKDGAICYKPTKSKKLSRLTYSSRCPAAKENGSRWIQYKGHCYKSDQALHSFSEAKKLCSKHDHSATIVSIKDEDENKFVSRLMRENNNITMRVWLGLSQHSVDQSWSWLDGSEVTFVKWENKSKSGVGRCSMLIASNETWKKVECEHGFGRVVCKVPLGPDYTAIAIIVATLSILVLMGGLIWFLFQRHRLHLAGFSSVRYAQGVNEDEIMLPSFHD

SEQ ID NO: 52 - protein, 1873 aa, Homo sapiens; identical to SEQ ID NO: 48

SEQ ID NO: 53 - protein, 1817 aa, Homo sapiens; identical to SEQ ID NO: 49

SEQ ID NO: 54 - protein, 1340 aa, Homo sapiens; identical to SEQ ID NO: 50

SEQ ID NO: 55 - DNA, 15226 bp, Homo sapiens
  source 1..15226: mol_type = genomic DNA
ggaagtccgggaaagagaaacttaaagacggtaatgctcgttcgtgtctcagacttgagtctgagaaggtcgcttgagatttaattacattggttttgcagataggaatagaatgtagctgacgtttgagcacgtagttagtgaaaacttcacacttcaaagtatgcgaaaaggaagaaaagtacccatgtatgtaccgggtgttttgcgtacgtatcctaaggctaaactggaaggtaggtagtgaaacctaggaggtagatgcagagacggagatgagtaaactctcctgacattgtatgtttattcttttttcaattgtttttaaaattttcttaactatgtcctgtgctcagatagcgtatgtttagtaggtcgtggaacgggggtttgtgcccaggtctgtgggttttctaaaacccgatcaggagcgtgtcttttgttatgtgcagtcgcatagggctggttaaggcatacatacattttaaagcagaaattgccatataccgtgacaacacaaaagagagaaggaagataagtttgaggtaataagcgggagaaacactagaggtttaaaacctgcagtctcgtatgattggttattctagttaacattagttaaggagtaatgtttacgtagttaacattggcttcttgaccgaagaatgccgaagtgtaatgatttttatcacggcattcatattctacaaattctcctctagttttagtattttataaaagtttaataaagtatatagtaaacttaatgttttgtttttagtttaaggaagatgtaatggtaacatttcaaaacgagggaagtaaattgcagtataatactgggaattctaaccgcactattttaagatgatagagcagaatatgtttgtctcagtcttaatttgacagtttcctttcagaattgtagtgtgtgtgtaagagaaggttggaagtatcaaattaatttgtctttgtgtaattgaagtgcgtgcaaaggaggtatgtattttctggaaatcataagtggatgtagtgtggtctgaaaggtagcaagtttagttcattgtaaagaacatttcagacatttcactttgctacacccgtcaagcacaaaggtttttaaacagcatgttttatctatacaaacttcagaaaatttatttttactttatgaacccttccccaccccaccgtacatgtcccagtctttaataagtactaatgatgaagtattgaaagcagtgcctctgcagaactattttttaggcaggagcaaagcaaacgagaatgtttggaggcatctagtttctaggaaaatgaatggagcccaattcttttttttcttttattttgctgctttttctcactggaaaatagagcccaattttatagtccgttcttctccagaaattgaattatggtgatgagtacttgtttctggattgtttggcctaggatgaactattgacaaataccttgttaacctgaattgtatgcacttgaatatgggcttttagatgttgtctccagttgtggaggatcctgtcgagagtggatcatttatgaatcgagaatccctgggaaattatctttgtttgcagcagaatgggcatcatcagtgcttgggttcaacctgttaaactactactgttactactaaaaatctcagggttttatctgatgtttgggggtagtggttttcctatgtgtagtgttggtattatatcaaagcctttttctcgatatttttatgtattaaggatgctttgaaatgcctaaatccttagtggctgtgggtgtcttccaatagttgtcctgtgaaaaaggattggttagacagataccatcaggcactgtactgagagtgaccactagcttgtttttctaatgcgtttacttacagctttgtaatgattggaatttcttagtaaaccagtataaagttttatcatttatctgaattagtaattttgatgctgtatgtaatgcttattgttcaaaaagataagtaatacagattcaaataagatactaataaaatcattgatttcatgcatctctccccccaactccccagaaacctgtgaaggtcgaaacagctgcgtttcctgttttaatgttagcgttgttaatactacctgcttttggatagaatgtaaaggtaagaaactttggggatgcaaaactgttttgttatagcattttaaaatacagtaattcttgaacacttgaaagttatgtaggacatttaggatattgtgcactatttattttgcaaatccagtactcctttaaagtgccagttgcctcgcactccccctgaaaatctctttttgtctcccatcctccctttagattccttaagacttgataattaaagctcagtcgtttgttttttatgagatggagtctcctgtgttacccaggttggtcttgaaatcctaggctcaagcaatcctccaaccttggcctccctagtagccaagactacagatgcgtgcttcctcacctggctttttttaaagcctgttctaaggattgagagtactttaatacactggaattagctgtgagtgaaggttgtgttgaaaactgtgtcctgcaacatgaaatataaagagaccttatgaaactgttggatgcttaggtgtagagaagaaagaggtagggagagttgacttcctgtgcttttgttaatacaagaggtagagcgctaaagggacgtacattgaaattcaataagattcttattagaaccatattactgcatacattattttaattgttttttaatgtaaagtggttgcacttatcagtaaaacaatctagttgttttggcggttttttttttaagtaaaaacaaaccataagtttttttatttggtaaaaattttaatagttctagaaattatatcactacataaatttcaaaaagctctttaaggtattaactaaattgggccaaattaacttttttgttatagaagtgtctcttttttttaggtcataaaatgggatttaagggcgtactctttcccctttatatgggagtatgtaagagttggtgaattttggagatggaatgctctactttaagatttgttgggaaaggttctccccttactcttgttccaagtctacctatccaggaaagttgttttagaaagtatagaagactaaagcagtgagatttggaatagagtttctacagtgttatggggtgcctcatctgtttactaacctcttaatacagaccctgaccacttcaacttactgtctccgcctttttttttttccctgagacagagttctgtatttttggtagaggcagggtctcaccatattggtcaggctgatctcgaactcctgacctcaggtgatcttcccaccctggcctcccaaagtgctgagattataggcgtgagccacctgcccactttttagatgatggctgcctttcttgattgtacagtagtcttcccacaattctgagatctaagtgttgcagatttattttttcagtatattaatgtggatttttaatggataaaagttagaaggatcctgcgtaatctctaagtcagtgggaaaaggagaatgacagggtttggtctgtgggtttaactttaggtcaaaacacctaaagtggttccccctgcccacttctaaagtgtttgggtttgatttcatagagcttagtagcagagtcaaagataatacaaatgggtggttgatgctgtttgtctcttttcccctgccccccaacagatgagagctattgttcacataactcaacagttagtgattgtcaagtggggaacacgacagacttctgttccggtaagtattcatattggctgcttggaagctgaccgcagagaggtgaggaagatcattgcctcagaaagccttgtttcagtgctttgtttgaagcattgccataattctcatcttgttagaattggaatatgaatagtatattcatattgattgattaaaggatgatatttgaagcttggtttagtgatttagctatagtgtggatgctgtaagtgtggatgcgttgtctgcccccacacttttttttttttttttaaacttttctaggaattcatcacagtttagccgctatgtttgcatcttgcaggtctgggaaacctcattctggcacttttggtgttgcgatactggggattgttgattgataaatttattctgcagcatagttggtgctgtggttaaatgagcttttctatacccatccattttctgtattttaatctgagtaacttgattaatttttaacctttactattcgtccagcaaaacgttaaaattctacttgaagctgctgatttttccaatgagattgtaaatcagtgggaaaggcatattcctaatttgatgcatagataataattgaataggaaaaagatttttgtgcagtgtgtctaaccttgaaagactacctttgactctttaattttggtaggggttgccccatcccaatgtgaattttgtaactgaacatttcattagtattagatcagttttacttcacacagggtgcataatatagttaggtggtacacgaacaaactttttttgagacagtctctttgttgcccaggctggagtgcagtggcacaatcataactcattgccacctcatattcctgggcttaagcaatccttctgcctcagcctccccagaagctgggattacaggtgcatgccaccatagctggctaatttaaaaatttttttgtagagatggtgtctcactatgttgcccaggctggtcttgaactcctgggcttaagcagtcttcccactttggcttcccagagtgctggaattacatgcttgagctactggacctggctgaaacattttaagtaattactttaatatgtgttagataaactaataactgtcagacctgtggttttgtaatattgcttagagacaagattaatgaagatttcattagtattagaacgtttttgaaaactgatttaaaggaaaactgtatttgtactgctgcatatttgatgatgtaccagttagaattagtttcagctatgaaggacataaacccccaaattacaatggcttaagcagtggactgatttacttttctctcatgtaaaggaagtctggactagagttcagctctgcaaccattagggactgaggcttctttaggtttttactctttcacctctcaaaaatggctttgaccctactgtccaaggtgggtccttatgttccagccatcacattgattattttcctgccagcaggatgaagaagggaatgaaagaggcttgtatcttactttaaggatgcttcctagaggttatgcgtgatggcctggaagcactggagactaggaaatgtcttttcaggaggaagggaggtgttgataaaaattggtgattctatttctaaagaagagactggtatttgggggcaactgtcagtctcttccacaggtagtatttaagtgttgtaaaaattgtgaaaagtactcaaatgattgcaggtcaggaactagcgttatagattgtgatattttaaatagctttgatgtatatggtttttcttttttctttttttaatagtttccacggccactccagtgccaacagccaattctacaggtaattcaagatgactgttttcttccttttccttcagtatttttaagctttcttgatggattagttttaaataattatgtaaaagttgttagtataattttaaagatgagtaaaaacttaaaagtcttggaccacagcaattaacgttaatctctaccttttgtgacagtgacacatagctccagtgttttatagtcggtgaatgtgagcagatttgctgaggctgtgtacattgagtctataaagtactttttatagatttagtggaaatcttgggaaatatagaagcctaaagcaaattataattctcatcatccagagcaaccaaaatgttttcagtgattaatttcttctagtcttttttatgtgtatctaaataaatacactttttatgaaattgtacgataacgttcatgcacctttgtatttctttttttcttttctttttttttttttggaagcgaagtcttgctctgccgctcaggctggagtgcagtggtacgatctcggttcactgcaaccttcccctcccaagttcaagcgattctcctgcctcagcctcctgagtcgctgggattacaggcacctgccatcatgcccaactaatttttgtttttttagtagagtcacggtttcaccacattggccaggctggtcttgaaatcctgacttaaagtgatccgcctacctcagactcccaaagagccgggattacaggtgtgagccaccgagcccagcctgtattttctctcttaatgtaagcattatggtatacactttacccatcctgctcttgattagagaattaggccgtctctcattctccatgcagtgaacatcttacatggaattgcatttgtatttatctctgataggtttgagtcaaacagaatttctaggtcagagggtatgattattttaaggctctccagaaagatttattattttcattcccatcaacctggaaagtttttaccgtgccctcaacagcatggataagaactccttaaaatttactaacttgagaggaagagtaaatattaaatacttaacattttaccaatattaaatgcgtctattccaagacaagtactagggtaaatggtagggttaagccagcattttgtctactgtaggaacaatgaaagatctcagtgagcacagcgtattgggaaatttgtaagaaggaatgtgtattgggtgggatgcagatgtggtgatagcttggtagtgaaactgcactggaaaacttggagagagcctctgaagtggagcagcgggtcagcacatgcggaggagatgtgaagtagtacggtgagttcaaagagtgtcccatcctgtacaaggtgagaaggagttaagctggtccatcaccagttgctcaccaggtgagcagaattgggaaacacctttgtatgccttgctggtagacttagatgttatcctgaaagattttaaagtttataggtcatatgatcagacttgcattttaataaaacaacttattctggcattgtggagagtagattggaacgatgccagaaggaactcaggagattagatagcctgttacaataattctagagaacagatagaggtgggctgcagatgtttgcaaataagtttaggaagtagaaggggtaggacttcatgactgagaggaggagaggtagagtgatagggagaaggggaggaattttcaccaaagtaagcaagaaagaggaagagcagtctattgatggttgggcctgtcatttgggattttagtttaagatacctagaatccatttaagtgggatctgttcagtattcaggaaactgcaagtcaggcaagagctcttggctaaaaatataaataggcataggcagtagtagaggcactggaggagcatatagaaagaagggatggggcttgaagaccagactctaggaaacagtaatgtctaagggctaggaagaagacgggaggaaatagggatgggggtagggtagtaaaaaagcccagagaagtatgtgcaagaaactaacagtatgtggttgtgggcgtagtttttcaaaggaagaagtagtcaaatgctgtaacaaggacaactcatcttgaaacacttacgcagtggtgtgtggagctggcttggaccagcttttgctagccagttattgtgtagtagctcttcccagcccatgttcagtgataccatgttggtaacttgaaactggttaccatggaaatagtcatgccatggaagtctgcaaatgatacaaaacttattttgagctgatgattatatggtgatgtggtcgtaaatatttaacactcattagaagacattgactaagtaggatgttgaaggttgctgaaaccagaggtgtttggagaaaagtaattttcagaaggttggttatgaaaagaaaatggggtgcagggagtgggggaacaatttattcagaactgttgttcatttcttgagaactgggttcactcttgatgtagttctctgcagctttctccaccctgggtcctcctgtgaattgccatgagtcttttgtgctatagctctctttggtgctgtaaagggggaaagcagcaagggcttatctgcagaaaatgcatcagttgactgacactagttgaagaacaaacctttaggcggtttcttttccgggcatgtgtaccgtctgccgaagagagcaagtgagaagtgaaggggtagttaaacaatgcaaagagaatctaatttatatagaagggtgtataatgaggttaattataatggccctccttcagtacaaataatagaatagccaaaatatgtcagatacagtggaaaatgttcatatgaagtggaagatgaactgtattaagcaattgtaatacaattttagctcttgttatatacatgcctagaaaaatggcaagaagtaacctgttactctgatgggactaattcagtattttttttggcattttctagattttcttaccactaatagcaacttttataacttatgattattattatttttttttaacctttcctaatgaatctttttttttcagtaaaagaaacagtaggtcaacagaggtatattccctaagtggtgcttttattttgaaaatattgtcaatgcaatacttttttcaaaatcgaaaataaaatattttgcctacttattaaaaagaaatagtttttaccttgttctgaggctgggtaatgagaaccaaattgcaaatttgcagaatttttttcctaacattgtcaaacaattggtaatagtgttttgagattgaacagaatttgatgtgtttaatttgtaaagtgtatttttttgtggttacacagaagcagtaaaaaccttgacagaaataatgagctttaacataaccacagcctctaatctaagaattctgtgtaaggaccagtcttaccagagataaggtcaaatattttcctgtaagattttctcagcatggagagttgagagaactgtttaatcaagagcaggatggatggaagtatgtacaacaatgcttgaagtaagagggaaaaaagaaagcaaatgggtctgaacatatccatcagtattatttgtatatcacctattagcttctaagtagtatcaatattaataaaagaagtcttaagctctctgtgactcatggtcatgtgaaaattagaataccttagtttcctaggattcagtcaaccttgggattatgggtagtcagcctgttacgagagtcctggtctttaaagatctacttttagcaacaattcaggtatttagcaatatctgaaaactgtcaagccctgctcttttagtgtatatttactgttaaagcacagaacttcctcttttatattagtagaatttgggaggatgctgattcctattgaggtttttgttcgattgtttgaaagtctaatgcagtgaaaagattactcatttctgtgcttcatcaacagttatttggcaccctttccctgtctttcgtgggttaagcatatcactttgaagtctgttcagttatgtactttaaacagaagtaacatttgttttccaaattctctttagccttcaaacccttttttctgaaatagtacaaaaatgaatgtttgcatagcaccttacatttttataaaaatataaatctcatatgattaatcttcctcatctttccccagatcatccctagcggcccaccagcataagcatatcctcatattgaagcccttgcactctgaagcctgacttacctaatgatttcctgagacaaaataagctctcttagctagtgactcctatagtgcactttccaaaaatttgaaccctacccttaggacaacctcttaatgaaacctttctcaaatgctccagcaaactttgaatttatttggtagccatttggatgttagaaaaaatgttaatttgtagaaactatattcacatccttcctttctgaaagccttggtcagacttctattagtattcatactaccaatagaaacttaataggtgatatactggctggacgaggtgagtcatgcttataatcccagcactttgggaggccaaggcggcagatcacttgaggtcaggagttcaagatgagcctggtcaacatggtgaaaccctgtctctcctaaaaataaaaaattagctgggtgtggtggcacatgcctgtaatcccagctacacaggaggctgagggaggagaatcgtttgaacctgggaggcggaggttgcagtgagctgagaatgcaccattgcactccagtctgggtgacagagcgagactccatctcaaaaaaaaaaaaagagtgctttagtccctaaaatgattttacattcaaactaatccttctcagagtgtacatttctttagcagtatcatcagctattaggttggtgcaaaagtaattgcagttcttgcctttagtaatggcaactcaaatagtattttggcctcatgcagtgtggtggactagagcttacttaaccttgggctcttagaatcttacgttggggaactgtgggcccagggcccctgttcttataaagctttattggaacataccatgcccattcgtctgcatgttgactttggctgcttttgcatcacacagtgcccaaagagtaaaatatttgctttcaacccatttaagaaaagtttgccaactcctgaagtgaagaagataggcaaatctcaatacccttgtaagagagaacttacgactttaatagtttttgtcttaggagaaagattatgaagaacctatagtttcctcacctaaatgttcttgcccttggcagtgagcaagataagagttttcgcaaattttatccagatgtatacatagattttatacaagatagatacatagatattaacaattttatgattgcttattgttttaaaatacacttaaatcctagtattcttgggtgcatagctatgttagtgaaccattaactgaaatttggcttttggtctctaaaaaattgaaagcatgttgaagttggcaggattattttttaaagctgttagataactgggaagctagaaatttaaggttttttaaaaagacattttgttttcattccagctaaacccacagttcagccctccccttctacaacttccaagacagttactacatcaggtaattgaggctttttagattagcaatgatgcaggatgtgtgcacgatgttgccctttacaatttctgccatcattttccagctttcttcgttaatggttatggaactgaaattcttctcttactcttaggggggatcaaggtagtgctttgttaacacaataatgatagctttgctgagattcctcttctcatttttaaatgtgtaatcacatttgacgtgacactttagaattaagtaataatgtttttccaaacatttcagtacaacttgtatgtaaaatctaatttgtaacttctgattaccgttagggattggttgtgtgctgtatgagagagcatggcgatttgagggaagataatatatccgtccttttcactgagaaaggtctaaaaagccagaatcactaccagatgtgcacctcactttcttaaccatttcttaacattgctcagtaatgtgaaaattagcttgttattaaatgatgatttgacataatctaatttaattcatagttaggttacgccacaggatactgtaggtacacaggttaggaatcctttcctccctccatatttttaaaaaactgatgctaatgaatcttctacctgctttttgtgatttctttttcttcatgcttatgccacctttttctcagtttcagtgaagccattctgtcttcacgagaaggaatacaaaacagttgtcattaaagttaccaacttgtacagccaccagaaccagtgttctttgataactgttacttttttcttagattattttaaatggaaatcgctttttctgtttcctcttgaaacattttactgcctgaaaagaattcagatatttgttttttccttattacttgataatactttctcatgtgaaatttgttggcaggatatgcctttaaaaacagttattttacttgttgaaattataaattgcatattattaagattatttttgtaacatgaaaaattgcaaccaaatattttaccttatactagtaaattcaaaagtcatgtgaattctcagcactattgacgtttacactcacaattaactaaaagtacatagtctgaagaaattgttgcatattttagaagtgtttgatacattcccagggcacaatttatgtactaggagaatttttcccattgtttttatatttgtactagtacagtagcattgaccactttgtatccttgggtggaatgaaaaatgggatatggttgtcttcctcaattagggataaattctagctgtaaagacttgaggaaatactttatagaatttaacacatggcaaaatagaggctcaggtgcatctttaaattacaatagaggaccatgaaacttaggattgttgtttcttttgtcttatctaacaggtacaacaaataacactgtgactccaacctcacaacctgtgcgaaagtctacctttgatgcagccagtttcattggaggaattgtcctggtcttgggtgtgcaggctgtaattttctttctttataaattctgcaaatctaaagaacgaaattaccacactctgtaaacagacccattgaattaataaggactggtgattcatttgtgtaactcactgaagccaaaatactatcttttaagatgtcccacatggaagacgctattccaggatctttaaatttccatggatgcatataggatgtttgggagcatcatccgtgaagaaaaaatcaattaaatcattgtgttcaacaggaatatttaaaatattctgcatgaatcctgtggctgtcttattttaaatagctgctgctgtgggattatattttttttccttaacatgccaaatataactttctgaaagtgatggaaaatgttgtcttgtgcagacaacatcatggctcttggcagtttaaatttagtaattttaatttagtgaacagaattgagaagaacgtgccaaatgagaatcaattaggtggatttttggctgtcatttcaaaagtggaataaatttattaatttagtagtactaaatggtatccttagattaaaattttgtgcttgataacagctgttttttctacattagaaataagatgccacacaaggaactacattccagatttaaagaaatgaaaggataccattagtgtgtataacagattattgttcatacttgtaaagcatcttatgtcattgagaatataaagaacagtgccttagaagacagtgaaaggtaagctctagcttaatgtctatgatttgttctttgacattaaggaaggtaaggattggtcagaggatgtaacttgatgtgagcagtagtaaacctgttttagatatcatactgttaatattttattgaaaatttatttcagagcggagaaacttaagctaaagtctgttatacagaattgaaagccttcgtatcttgaacctcccaacatttttcttatggctgttgaaaagtatagagctaaattgatttaattacactttcctttgtactttaaaaaaaagtatgctagcactattgtaccttgaaaggatttccaccagactgtcttgagtagtgacttctttggtgaggcaagaaggatatacattattttagaatcatttactatttaaatgagacaatcatattattttagaatcatttattttaaatgagacaatcattttaagttttaagataacagaagtgaccaatgtaatttcacaacacctaaggattttttggttgatcaggttactgtagatttttactgattgtcctggatgaatagactgtgctttttctttttctctcccttccttcttggtttcccatagtataataagcatgcatactttaacttctatagttttctcctttagagggtcgtcttcagttttagaggtttacttctcccttgcctttgactcattggactagtgcagaggctttaagtagtttaaaatgggcttttgcttttctaggtcattaacgttttttatttagtttctttagccaatagtggctgagtttcgcacttgattttcaatattttatagtaagaaatgacaaactgctttgtttcatttcataaacaaactctgcatttagataactattaaaggttgttaagatgaagatttactgtttctttgttactcgttggtacagctgtttgttttacttgcacatttgtacatatacttaatgttttcaagtgccttaattgtttaaaatctctggcttcaaagtttcttggggaaaggtcggtttacctcacattttttgtttccattagtaatattctaggtacctcacaaaatgtattatggtgccatggctgttagtttttagtgagtgctgtaggattaattcgaaaataggcagaattccattcctcccaaggtggcaaaaattagctatactgatgtaattgtcatttacctgggtatgaattccctgacacacattcatgtcaacatatgtagcaaattttgtgaaaacataacaatttgaagcttctgtaattttgagcactgctctaacaacaagcataatataaaattagttagattttgcaagtctacaaatgagctcttgcaacagaactcacagcctttttacttttttcccctaactttagcaatgtagtatcttgagccattaatttttgggtttttttaaaatccagaaggtatatagaaaccttttcagatttttcatctgatttgttcttgcagatgttcttctatcaaataccttattttaccttacagatatttgttgcacaggcagatactgctgtatttagacatttctatttcagttcattaaaaactgcaaaaccaatctgtatcatgtaccaaactgacttaaaataaatctacatgtttattgaattaa

SEQ ID NO: 56 - DNA, 15226 bp, Homo sapiens
  source 1..15226: mol_type = genomic DNA
ggaagtccgggaaagagaaacttaaagacggtaatgctcgttcgtgtctcagacttgagtctgagaaggtcgcttgagatttaattacattggttttgcagataggaatagaatgtagctgacgtttgagcacgtagttagtgaaaacttcacacttcaaagtatgcgaaaaggaagaaaagtacccatgtatgtaccgggtgttttgcgtacgtatcctaaggctaaactggaaggtaggtagtgaaacctaggaggtagatgcagagacggagatgagtaaactctcctgacatagtatgtttattcttttttcaattgtttttaaaattttcttaactatgtcctgtgctcagatagcgtatgtttagtaggtcgtggaacgggggtttgtgcccaggtctgtgggttttctaaaacccgatcaggagcgtgtcttttgttatgtgcagtcgcatagggctggttaaggcatacatacattttaaagcagaaattgccatataccgtgacaacacaaaagagagaaggaagataagtttgaggtaataagcgggagaaacactagaggtttaaaacctgcagtctcgtatgattggttattctagttaacattagttaaggagtaatgtttacgtagttaacattggcttcttgaccgaagaatgccgaagtgtaatgatttttatcacggcattcatattctacaaattctcctctagttttagtattttataaaagtttaataaagtatatagtaaacttaatgttttgtttttagtttaaggaagatgtaatggtaacatttcaaaacgagggaagtaaattgcagtataatactgggaattctaaccgcactattttaagatgatagagcagaatatgtttgtctcagtcttaatttgacagtttcctttcagaattgtagtgtgtgtgtaagagaaggttggaagtatcaaattaatttgtctttgtgtaattgaagtgcgtgcaaaggaggtatgtattttctggaaatcataagtggatgtagtgtggtctgaaaggtagcaagtttagttcattgtaaagaacatttcagacatttcactttgctacacccgtcaagcacaaaggtttttaaacagcatgttttatctatacaaacttcagaaaatttatttttactttatgaacccttccccaccccaccgtacatgtcccagtctttaataagtactaatgatgaagtattgaaagcagtgcctctgcagaactattttttaggcaggagcaaagcaaacgagaatgtttggaggcatctagtttctaggaaaatgaatggagcccaattcttttttttcttttattttgctgctttttctcactggaaaatagagcccaattttatagtccgttcttctccagaaattgaattatggtgatgagtacttgtttctggattgtttggcctaggatgaactattgacaaataccttgttaacctgaattgtatgcacttgaatatgggcttttagatgttgtctccagttgtggaggatcctgtcgagagtggatcatttatgaatcgagaatccctgggaaattatctttgtttgcagcagaatgggcatcatcagtgcttgggttcaacctgttaaactactactgttactactaaaaatctcagggttttatctgatgtttgggggtagtggttttcctatgtgtagtgttggtattatatcaaagcctttttctcgatatttttatgtattaaggatgctttgaaatgcctaaatccttagtggctgtgggtgtcttccaatagttgtcctgtgaaaaaggattggttagacagataccatcaggcactgtactgagagtgaccactagcttgtttttctaatgcgtttacttacagctttgtaatgattggaatttcttagtaaaccagtataaagttttatcatttatctgaattagtaattttgatgctgtatgtaatgcttattgttcaaaaagataagtaatacagattcaaataagatactaataaaatcattgatttcatgcatctctccccccaactccccagaaacctgtgaaggtcgaaacagctgcgtttcctgttttaatgttagcgttgttaatactacctgcttttggatagaatgtaaaggtaagaaactttggggatgcaaaactgttttgttatagcattttaaaatacagtaattcttgaacacttgaaagttatgtaggacatttaggatattgtgcactatttattttgcaaatccagtactcctttaaagtgccagttgcctcgcactccccctgaaaatctctttttgtctcccatcctccctttagattccttaagacttgataattaaagctcagtcgtttgttttttatgagatggagtctcctgtgttacccaggttggtcttgaaatcctaggctcaagcaatcctccaaccttggcctccctagtagccaagactacagatgcgtgcttcctcacctggctttttttaaagcctgttctaaggattgagagtactttaatacactggaattagctgtgagtgaaggttgtgttgaaaactgtgtcctgcaacatgaaatataaagagaccttatgaaactgttggatgcttaggtgtagagaagaaagaggtagggagagttgacttcctgtgcttttgttaatacaagaggtagagcgctaaagggacgtacattgaaattcaataagattcttattagaaccatattactgcatacattattttaattgttttttaatgtaaagtggttgcacttatcagtaaaacaatctagttgttttggcggttttttttttaagtaaaaacaaaccataagtttttttatttggtaaaaattttaatagttctagaaattatatcactacataaatttcaaaaagctctttaaggtattaactaaattgggccaaattaacttttttgttatagaagtgtctcttttttttaggtcataaaatgggatttaagggcgtactctttcccctttatatgggagtatgtaagagttggtgaattttggagatggaatgctctactttaagatttgttgggaaaggttctccccttactcttgttccaagtctacctatccaggaaagttgttttagaaagtatagaagactaaagcagtgagatttggaatagagtttctacagtgttatggggtgcctcatctgtttactaacctcttaatacagaccctgaccacttcaacttactgtctccgcctttttttttttccctgagacagagttctgtatttttggtagaggcagggtctcaccatattggtcaggctgatctcgaactcctgacctcaggtgatcttcccaccctggcctcccaaagtgctgagattataggcgtgagccacctgcccactttttagatgatggctgcctttcttgattgtacagtagtcttcccacaattctgagatctaagtgttgcagatttattttttcagtatattaatgtggatttttaatggataaaagttagaaggatcctgcgtaatctctaagtcagtgggaaaaggagaatgacagggtttggtctgtgggtttaactttaggtcaaaacacctaaagtggttccccctgcccacttctaaagtgtttgggtttgatttcatagagcttagtagcagagtcaaagataatacaaatgggtggttgatgctgtttgtctcttttcccctgccccccaacagatgagagctattgttcacataactcaacagttagtgattgtcaagtggggaacacgacagacttctgttccggtaagtattcatattggctgcttggaagctgaccgcagagaggtgaggaagatcattgcctcagaaagccttgtttcagtgctttgtttgaagcattgccataattctcatcttgttagaattggaatatgaatagtatattcatattgattgattaaaggatgatatttgaagcttggtttagtgatttagctatagtgtggatgctgtaagtgtggatgcgttgtctgcccccacacttttttttttttttttaaacttttctaggaattcatcacagtttagccgctatgtttgcatcttgcaggtctgggaaacctcattctggcacttttggtgttgcgatactggggattgttgattgataaatttattctgcagcatagttggtgctgtggttaaatgagcttttctatacccatccattttctgtattttaatctgagtaacttgattaatttttaacctttactattcgtccagcaaaacgttaaaattctacttgaagctgctgatttttccaatgagattgtaaatcagtgggaaaggcatattcctaatttgatgcatagataataattgaataggaaaaagatttttgtgcagtgtgtctaaccttgaaagactacctttgactctttaattttggtaggggttgccccatcccaatgtgaattttgtaactgaacatttcattagtattagatcagttttacttcacacagggtgcataatatagttaggtggtacacgaacaaactttttttgagacagtctctttgttgcccaggctggagtgcagtggcacaatcataactcattgccacctcatattcctgggcttaagcaatccttctgcctcagcctccccagaagctgggattacaggtgcatgccaccatagctggctaatttaaaaatttttttgtagagatggtgtctcactatgttgcccaggctggtcttgaactcctgggcttaagcagtcttcccactttggcttcccagagtgctggaattacatgcttgagctactggacctggctgaaacattttaagtaattactttaatatgtgttagataaactaataactgtcagacctgtggttttgtaatattgcttagagacaagattaatgaagatttcattagtattagaacgtttttgaaaactgatttaaaggaaaactgtatttgtactgctgcatatttgatgatgtaccagttagaattagtttcagctatgaaggacataaacccccaaattacaatggcttaagcagtggactgatttacttttctctcatgtaaaggaagtctggactagagttcagctctgcaaccattagggactgaggcttctttaggtttttactctttcacctctcaaaaatggctttgaccctactgtccaaggtgggtccttatgttccagccatcacattgattattttcctgccagcaggatgaagaagggaatgaaagaggcttgtatcttactttaaggatgcttcctagaggttatgcgtgatggcctggaagcactggagactaggaaatgtcttttcaggaggaagggaggtgttgataaaaattggtgattctatttctaaagaagagactggtatttgggggcaactgtcagtctcttccacaggtagtatttaagtgttgtaaaaattgtgaaaagtactcaaatgattgcaggtcaggaactagcgttatagattgtgatattttaaatagctttgatgtatatggtttttcttttttctttttttaatagtttccacggccactccagtgccaacagccaattctacaggtaattcaagatgactgttttcttccttttccttcagtatttttaagctttcttgatggattagttttaaataattatgtaaaagttgttagtataattttaaagatgagtaaaaacttaaaagtcttggaccacagcaattaacgttaatctctaccttttgtgacagtgacacatagctccagtgttttatagtcggtgaatgtgagcagatttgctgaggctgtgtacattgagtctataaagtactttttatagatttagtggaaatcttgggaaatatagaagcctaaagcaaattataattctcatcatccagagcaaccaaaatgttttcagtgattaatttcttctagtcttttttatgtgtatctaaataaatacactttttatgaaattgtacgataacgttcatgcacctttgtatttctttttttcttttctttttttttttttggaagcgaagtcttgctctgccgctcaggctggagtgcagtggtacgatctcggttcactgcaaccttcccctcccaagttcaagcgattctcctgcctcagcctcctgagtcgctgggattacaggcacctgccatcatgcccaactaatttttgtttttttagtagagtcacggtttcaccacattggccaggctggtcttgaaatcctgacttaaagtgatccgcctacctcagactcccaaagagccgggattacaggtgtgagccaccgagcccagcctgtattttctctcttaatgtaagcattatggtatacactttacccatcctgctcttgattagagaattaggccgtctctcattctccatgcagtgaacatcttacatggaattgcatttgtatttatctctgataggtttgagtcaaacagaatttctaggtcagagggtatgattattttaaggctctccagaaagatttattattttcattcccatcaacctggaaagtttttaccgtgccctcaacagcatggataagaactccttaaaatttactaacttgagaggaagagtaaatattaaatacttaacattttaccaatattaaatgcgtctattccaagacaagtactagggtaaatggtagggttaagccagcattttgtctactgtaggaacaatgaaagatctcagtgagcacagcgtattgggaaatttgtaagaaggaatgtgtattgggtgggatgcagatgtggtgatagcttggtagtgaaactgcactggaaaacttggagagagcctctgaagtggagcagcgggtcagcacatgcggaggagatgtgaagtagtacggtgagttcaaagagtgtcccatcctgtacaaggtgagaaggagttaagctggtccatcaccagttgctcaccaggtgagcagaattgggaaacacctttgtatgccttgctggtagacttagatgttatcctgaaagattttaaagtttataggtcatatgatcagacttgcattttaataaaacaacttattctggcattgtggagagtagattggaacgatgccagaaggaactcaggagattagatagcctgttacaataattctagagaacagatagaggtgggctgcagatgtttgcaaataagtttaggaagtagaaggggtaggacttcatgactgagaggaggagaggtagagtgatagggagaaggggaggaattttcaccaaagtaagcaagaaagaggaagagcagtctattgatggttgggcctgtcatttgggattttagtttaagatacctagaatccatttaagtgggatctgttcagtattcaggaaactgcaagtcaggcaagagctcttggctaaaaatataaataggcataggcagtagtagaggcactggaggagcatatagaaagaagggatggggcttgaagaccagactctaggaaacagtaatgtctaagggctaggaagaagacgggaggaaatagggatgggggtagggtagtaaaaaagcccagagaagtatgtgcaagaaactaacagtatgtggttgtgggcgtagtttttcaaaggaagaagtagtcaaatgctgtaacaaggacaactcatcttgaaacacttacgcagtggtgtgtggagctggcttggaccagcttttgctagccagttattgtgtagtagctcttcccagcccatgttcagtgataccatgttggtaacttgaaactggttaccatggaaatagtcatgccatggaagtctgcaaatgatacaaaacttattttgagctgatgattatatggtgatgtggtcgtaaatatttaacactcattagaagacattgactaagtaggatgttgaaggttgctgaaaccagaggtgtttggagaaaagtaattttcagaaggttggttatgaaaagaaaatggggtgcagggagtgggggaacaatttattcagaactgttgttcatttcttgagaactgggttcactcttgatgtagttctctgcagctttctccaccctgggtcctcctgtgaattgccatgagtcttttgtgctatagctctctttggtgctgtaaagggggaaagcagcaagggcttatctgcagaaaatgcatcagttgactgacactagttgaagaacaaacctttaggcggtttcttttccgggcatgtgtaccgtctgccgaagagagcaagtgagaagtgaaggggtagttaaacaatgcaaagagaatctaatttatatagaagggtgtataatgaggttaattataatggccctccttcagtacaaataatagaatagccaaaatatgtcagatacagtggaaaatgttcatatgaagtggaagatgaactgtattaagcaattgtaatacaattttagctcttgttatatacatgcctagaaaaatggcaagaagtaacctgttactctgatgggactaattcagtattttttttggcattttctagattttcttaccactaatagcaacttttataacttatgattattattatttttttttaacctttcctaatgaatctttttttttcagtaaaagaaacagtaggtcaacagaggtatattccctaagtggtgcttttattttgaaaatattgtcaatgcaatacttttttcaaaatcgaaaataaaatattttgcctacttattaaaaagaaatagtttttaccttgttctgaggctgggtaatgagaaccaaattgcaaatttgcagaatttttttcctaacattgtcaaacaattggtaatagtgttttgagattgaacagaatttgatgtgtttaatttgtaaagtgtatttttttgtggttacacagaagcagtaaaaaccttgacagaaataatgagctttaacataaccacagcctctaatctaagaattctgtgtaaggaccagtcttaccagagataaggtcaaatattttcctgtaagattttctcagcatggagagttgagagaactgtttaatcaagagcaggatggatggaagtatgtacaacaatgcttgaagtaagagggaaaaaagaaagcaaatgggtctgaacatatccatcagtattatttgtatatcacctattagcttctaagtagtatcaatattaataaaagaagtcttaagctctctgtgactcatggtcatgtgaaaattagaataccttagtttcctaggattcagtcaaccttgggattatgggtagtcagcctgttacgagagtcctggtctttaaagatctacttttagcaacaattcaggtatttagcaatatctgaaaactgtcaagccctgctcttttagtgtatatttactgttaaagcacagaacttcctcttttatattagtagaatttgggaggatgctgattcctattgaggtttttgttcgattgtttgaaagtctaatgcagtgaaaagattactcatttctgtgcttcatcaacagttatttggcaccctttccctgtctttcgtgggttaagcatatcactttgaagtctgttcagttatgtactttaaacagaagtaacatttgttttccaaattctctttagccttcaaacccttttttctgaaatagtacaaaaatgaatgtttgcatagcaccttacatttttataaaaatataaatctcatatgattaatcttcctcatctttccccagatcatccctagcggcccaccagcataagcatatcctcatattgaagcccttgcactctgaagcctgacttacctaatgatttcctgagacaaaataagctctcttagctagtgactcctatagtgcactttccaaaaatttgaaccctacccttaggacaacctcttaatgaaacctttctcaaatgctccagcaaactttgaatttatttggtagccatttggatgttagaaaaaatgttaatttgtagaaactatattcacatccttcctttctgaaagccttggtcagacttctattagtattcatactaccaatagaaacttaataggtgatatactggctggacgaggtgagtcatgcttataatcccagcactttgggaggccaaggcggcagatcacttgaggtcaggagttcaagatgagcctggtcaacatggtgaaaccctgtctctcctaaaaataaaaaattagctgggtgtggtggcacatgcctgtaatcccagctacacaggaggctgagggaggagaatcgtttgaacctgggaggcggaggttgcagtgagctgagaatgcaccattgcactccagtctgggtgacagagcgagactccatctcaaaaaaaaaaaaagagtgctttagtccctaaaatgattttacattcaaactaatccttctcagagtgtacatttctttagcagtatcatcagctattaggttggtgcaaaagtaattgcagttcttgcctttagtaatggcaactcaaatagtattttggcctcatgcagtgtggtggactagagcttacttaaccttgggctcttagaatcttacgttggggaactgtgggcccagggcccctgttcttataaagctttattggaacataccatgcccattcgtctgcatgttgactttggctgcttttgcatcacacagtgcccaaagagtaaaatatttgctttcaacccatttaagaaaagtttgccaactcctgaagtgaagaagataggcaaatctcaatacccttgtaagagagaacttacgactttaatagtttttgtcttaggagaaagattatgaagaacctatagtttcctcacctaaatgttcttgcccttggcagtgagcaagataagagttttcgcaaattttatccagatgtatacatagattttatacaagatagatacatagatattaacaattttatgattgcttattgttttaaaatacacttaaatcctagtattcttgggtgcatagctatgttagtgaaccattaactgaaatttggcttttggtctctaaaaaattgaaagcatgttgaagttggcaggattattttttaaagctgttagataactgggaagctagaaatttaaggttttttaaaaagacattttgttttcattccagctaaacccacagttcagccctccccttctacaacttccaagacagttactacatcaggtaattgaggctttttagattagcaatgatgcaggatgtgtgcacgatgttgccctttacaatttctgccatcattttccagctttcttcgttaatggttatggaactgaaattcttctcttactcttaggggggatcaaggtagtgctttgttaacacaataatgatagctttgctgagattcctcttctcatttttaaatgtgtaatcacatttgacgtgacactttagaattaagtaataatgtttttccaaacatttcagtacaacttgtatgtaaaatctaatttgtaacttctgattaccgttagggattggttgtgtgctgtatgagagagcatggcgatttgagggaagataatatatccgtccttttcactgagaaaggtctaaaaagccagaatcactaccagatgtgcacctcactttcttaaccatttcttaacattgctcagtaatgtgaaaattagcttgttattaaatgatgatttgacataatctaatttaattcatagttaggttacgccacaggatactgtaggtacacaggttaggaatcctttcctccctccatatttttaaaaaactgatgctaatgaatcttctacctgctttttgtgatttctttttcttcatgcttatgccacctttttctcagtttcagtgaagccattctgtcttcacgagaaggaatacaaaacagttgtcattaaagttaccaacttgtacagccaccagaaccagtgttctttgataactgttacttttttcttagattattttaaatggaaatcgctttttctgtttcctcttgaaacattttactgcctgaaaagaattcagatatttgttttttccttattacttgataatactttctcatgtgaaatttgttggcaggatatgcctttaaaaacagttattttacttgttgaaattataaattgcatattattaagattatttttgtaacatgaaaaattgcaaccaaatattttaccttatactagtaaattcaaaagtcatgtgaattctcagcactattgacgtttacactcacaattaactaaaagtacatagtctgaagaaattgttgcatattttagaagtgtttgatacattcccagggcacaatttatgtactaggagaatttttcccattgtttttatatttgtactagtacagtagcattgaccactttgtatccttgggtggaatgaaaaatgggatatggttgtcttcctcaattagggataaattctagctgtaaagacttgaggaaatactttatagaatttaacacatggcaaaatagaggctcaggtgcatctttaaattacaatagaggaccatgaaacttaggattgttgtttcttttgtcttatctaacaggtacaacaaataacactgtgactccaacctcacaacctgtgcgaaagtctacctttgatgcagccagtttcattggaggaattgtcctggtcttgggtgtgcaggctgtaattttctttctttataaattctgcaaatctaaagaacgaaattaccacactctgtaaacagacccattgaattaataaggactggtgattcatttgtgtaactcactgaagccaaaatactatcttttaagatgtcccacatggaagacgctattccaggatctttaaatttccatggatgcatataggatgtttgggagcatcatccgtgaagaaaaaatcaattaaatcattgtgttcaacaggaatatttaaaatattctgcatgaatcctgtggctgtcttattttaaatagctgctgctgtgggattatattttttttccttaacatgccaaatataactttctgaaagtgatggaaaatgttgtcttgtgcagacaacatcatggctcttggcagtttaaatttagtaattttaatttagtgaacagaattgagaagaacgtgccaaatgagaatcaattaggtggatttttggctgtcatttcaaaagtggaataaatttattaatttagtagtactaaatggtatccttagattaaaattttgtgcttgataacagctgttttttctacattagaaataagatgccacacaaggaactacattccagatttaaagaaatgaaaggataccattagtgtgtataacagattattgttcatacttgtaaagcatcttatgtcattgagaatataaagaacagtgccttagaagacagtgaaaggtaagctctagcttaatgtctatgatttgttctttgacattaaggaaggtaaggattggtcagaggatgtaacttgatgtgagcagtagtaaacctgttttagatatcatactgttaatattttattgaaaatttatttcagagcggagaaacttaagctaaagtctgttatacagaattgaaagccttcgtatcttgaacctcccaacatttttcttatggctgttgaaaagtatagagctaaattgatttaattacactttcctttgtactttaaaaaaaagtatgctagcactattgtaccttgaaaggatttccaccagactgtcttgagtagtgacttctttggtgaggcaagaaggatatacattattttagaatcatttactatttaaatgagacaatcatattattttagaatcatttattttaaatgagacaatcattttaagttttaagataacagaagtgaccaatgtaatttcacaacacctaaggattttttggttgatcaggttactgtagatttttactgattgtcctggatgaatagactgtgctttttctttttctctcccttccttcttggtttcccatagtataataagcatgcatactttaacttctatagttttctcctttagagggtcgtcttcagttttagaggtttacttctcccttgcctttgactcattggactagtgcagaggctttaagtagtttaaaatgggcttttgcttttctaggtcattaacgttttttatttagtttctttagccaatagtggctgagtttcgcacttgattttcaatattttatagtaagaaatgacaaactgctttgtttcatttcataaacaaactctgcatttagataactattaaaggttgttaagatgaagatttactgtttctttgttactcgttggtacagctgtttgttttacttgcacatttgtacatatacttaatgttttcaagtgccttaattgtttaaaatctctggcttcaaagtttcttggggaaaggtcggtttacctcacattttttgtttccattagtaatattctaggtacctcacaaaatgtattatggtgccatggctgttagtttttagtgagtgctgtaggattaattcgaaaataggcagaattccattcctcccaaggtggcaaaaattagctatactgatgtaattgtcatttacctgggtatgaattccctgacacacattcatgtcaacatatgtagcaaattttgtgaaaacataacaatttgaagcttctgtaattttgagcactgctctaacaacaagcataatataaaattagttagattttgcaagtctacaaatgagctcttgcaacagaactcacagcctttttacttttttcccctaactttagcaatgtagtatcttgagccattaatttttgggtttttttaaaatccagaaggtatatagaaaccttttcagatttttcatctgatttgttcttgcagatgttcttctatcaaataccttattttaccttacagatatttgttgcacaggcagatactgctgtatttagacatttctatttcagttcattaaaaactgcaaaaccaatctgtatcatgtaccaaactgacttaaaataaatctacatgtttattgaattaa

SEQ ID NO: 57 - RNA, 2992 nt, Homo sapiens
  source 1..2992: mol_type = other RNA
ggaagtccgggaaagagaaacttaaagacggtaatgctcgttcgtgtctcagacttgagtctgagaaggtcgcttgagatttaattacattggttttgcagataggaatagaatgtagctgacgtttgagcacgtagttagtgaaaacttcacacttcaaagtatgcgaaaaggaagaaaagtacccatgtatgtaccgggtgttttgcgtacgtatcctaaggctaaactggaagaaacctgtgaaggtcgaaacagctgcgtttcctgttttaatgttagcgttgttaatactacctgcttttggatagaatgtaaagatgagagctattgttcacataactcaacagttagtgattgtcaagtggggaacacgacagacttctgttccgtttccacggccactccagtgccaacagccaattctacagctaaacccacagttcagccctccccttctacaacttccaagacagttactacatcaggtacaacaaataacactgtgactccaacctcacaacctgtgcgaaagtctacctttgatgcagccagtttcattggaggaattgtcctggtcttgggtgtgcaggctgtaattttctttctttataaattctgcaaatctaaagaacgaaattaccacactctgtaaacagacccattgaattaataaggactggtgattcatttgtgtaactcactgaagccaaaatactatcttttaagatgtcccacatggaagacgctattccaggatctttaaatttccatggatgcatataggatgtttgggagcatcatccgtgaagaaaaaatcaattaaatcattgtgttcaacaggaatatttaaaatattctgcatgaatcctgtggctgtcttattttaaatagctgctgctgtgggattatattttttttccttaacatgccaaatataactttctgaaagtgatggaaaatgttgtcttgtgcagacaacatcatggctcttggcagtttaaatttagtaattttaatttagtgaacagaattgagaagaacgtgccaaatgagaatcaattaggtggatttttggctgtcatttcaaaagtggaataaatttattaatttagtagtactaaatggtatccttagattaaaattttgtgcttgataacagctgttttttctacattagaaataagatgccacacaaggaactacattccagatttaaagaaatgaaaggataccattagtgtgtataacagattattgttcatacttgtaaagcatcttatgtcattgagaatataaagaacagtgccttagaagacagtgaaaggtaagctctagcttaatgtctatgatttgttctttgacattaaggaaggtaaggattggtcagaggatgtaacttgatgtgagcagtagtaaacctgttttagatatcatactgttaatattttattgaaaatttatttcagagcggagaaacttaagctaaagtctgttatacagaattgaaagccttcgtatcttgaacctcccaacatttttcttatggctgttgaaaagtatagagctaaattgatttaattacactttcctttgtactttaaaaaaaagtatgctagcactattgtaccttgaaaggatttccaccagactgtcttgagtagtgacttctttggtgaggcaagaaggatatacattattttagaatcatttactatttaaatgagacaatcatattattttagaatcatttattttaaatgagacaatcattttaagttttaagataacagaagtgaccaatgtaatttcacaacacctaaggattttttggttgatcaggttactgtagatttttactgattgtcctggatgaatagactgtgctttttctttttctctcccttccttcttggtttcccatagtataataagcatgcatactttaacttctatagttttctcctttagagggtcgtcttcagttttagaggtttacttctcccttgcctttgactcattggactagtgcagaggctttaagtagtttaaaatgggcttttgcttttctaggtcattaacgttttttatttagtttctttagccaatagtggctgagtttcgcacttgattttcaatattttatagtaagaaatgacaaactgctttgtttcatttcataaacaaactctgcatttagataactattaaaggttgttaagatgaagatttactgtttctttgttactcgttggtacagctgtttgttttacttgcacatttgtacatatacttaatgttttcaagtgccttaattgtttaaaatctctggcttcaaagtttcttggggaaaggtcggtttacctcacattttttgtttccattagtaatattctaggtacctcacaaaatgtattatggtgccatggctgttagtttttagtgagtgctgtaggattaattcgaaaataggcagaattccattcctcccaaggtggcaaaaattagctatactgatgtaattgtcatttacctgggtatgaattccctgacacacattcatgtcaacatatgtagcaaattttgtgaaaacataacaatttgaagcttctgtaattttgagcactgctctaacaacaagcataatataaaattagttagattttgcaagtctacaaatgagctcttgcaacagaactcacagcctttttacttttttcccctaactttagcaatgtagtatcttgagccattaatttttgggtttttttaaaatccagaaggtatatagaaaccttttcagatttttcatctgatttgttcttgcagatgttcttctatcaaataccttattttaccttacagatatttgttgcacaggcagatactgctgtatttagacatttctatttcagttcattaaaaactgcaaaaccaatctgtatcatgtaccaaactgacttaaaataaatctacatgtttattgaattaa

SEQ ID NO: 58 - RNA, 2414 nt, Homo sapiens
  source 1..2414: mol_type = other RNA
gcggcgccgcaggggattgaggggttgactgagcgttgcgagccttagctttctcccgaacgccagcgctgaggacacgatgtcgcggctctcccgctcactgctttgggccgccacctgcctgggcgtgctctgcgtgctgtccgcggacaagaacacgacccagcacccgaacgtgacgactttagcgcccatctccaacgtaacctcggcgccggtgacgtccctcccgctggtcaccactccggcaccagaaacctgtgaaggtcgaaacagctgcgtttcctgttttaatgttagcgttgttaatactacctgcttttggatagaatgtaaagatgagagctattgttcacataactcaacagttagtgattgtcaagtggggaacacgacagacttctgttccgtttccacggccactccagtgccaacagccaattctacagctaaacccacagttcagccctccccttctacaacttccaagacagttactacatcaggtacaacaaataacactgtgactccaacctcacaacctgtgcgaaagtctacctttgatgcagccagtttcattggaggaattgtcctggtcttggaaataagatgccacacaaggaactacattccagatttaaagaaatgaaaggataccattagtgtgtataacagattattgttcatacttgtaaagcatcttatgtcattgagaatataaagaacagtgccttagaagacagtgaaaggtaagctctagcttaatgtctatgatttgttctttgacattaaggaaggtaaggattggtcagaggatgtaacttgatgtgagcagtagtaaacctgttttagatatcatactgttaatattttattgaaaatttatttcagagcggagaaacttaagctaaagtctgttatacagaattgaaagccttcgtatcttgaacctcccaacatttttcttatggctgttgaaaagtatagagctaaattgatttaattacactttcctttgtactttaaaaaaaagtatgctagcactattgtaccttgaaaggatttccaccagactgtcttgagtagtgacttctttggtgaggcaagaaggatatacattattttagaatcatttactatttaaatgagacaatcatattattttagaatcatttattttaaatgagacaatcattttaagttttaagataacagaagtgaccaatgtaatttcacaacacctaaggattttttggttgatcaggttactgtagatttttactgattgtcctggatgaatagactgtgctttttctttttctctcccttccttcttggtttcccatagtataataagcatgcatactttaacttctatagttttctcctttagagggtcgtcttcagttttagaggtttacttctcccttgcctttgactcattggactagtgcagaggctttaagtagtttaaaatgggcttttgcttttctaggtcattaacgttttttatttagtttctttagccaatagtggctgagtttcgcacttgattttcaatattttatagtaagaaatgacaaactgctttgtttcatttcataaacaaactctgcatttagataactattaaaggttgttaagatgaagatttactgtttctttgttactcgttggtacagctgtttgttttacttgcacatttgtacatatacttaatgttttcaagtgccttaattgtttaaaatctctggcttcaaagtttcttggggaaaggtcggtttacctcacattttttgtttccattagtaatattctaggtacctcacaaaatgtattatggtgccatggctgttagtttttagtgagtgctgtaggattaattcgaaaataggcagaattccattcctcccaaggtggcaaaaattagctatactgatgtaattgtcatttacctgggtatgaattccctgacacacattcatgtcaacatatgtagcaaattttgtgaaaacataacaatttgaagcttctgtaattttgagcactgctctaacaacaagcataatataaaattagttagattttgcaagtctacaaatgagctcttgcaacagaactcacagcctttttacttttttcccctaactttagcaatgtagtatcttgagccattaatttttgggtttttttaaaatccagaaggtatatagaaaccttttcagatttttcatctgatttgttcttgcagatgttcttctatcaaataccttattttaccttacagatatttgttgcacaggcagatactgctgtatttagacatttctatttcagttcattaaaaactgcaaaaccaatctgtatcatgtaccaaactgacttaaaataaatctacatgtttattgaattaa

SEQ ID NO: 59 - RNA, 3020 nt, Homo sapiens
  source 1..3020: mol_type = other RNA
agtctcggaggcggcgccgcaggggattgaggggttgactgagcgttgcgagccttagctttctcccgaacgccagcgctgaggacacgatgtcgcggctctcccgctcactgctttgggccgccacctgcctgggcgtgctctgcgtgctgtccgcggacaagaacacgacccagcacccgaacgtgacgactttagcgcccatctccaacgtaacctcggcgccggtgacgtccctcccgctggtcaccactccggcaccagaaacctgtgaaggtcgaaacagctgcgtttcctgttttaatgttagcgttgttaatactacctgcttttggatagaatgtaaagatgagagctattgttcacataactcaacagttagtgattgtcaagtggggaacacgacagacttctgttccgtttccacggccactccagtgccaacagccaattctacagctaaacccacagttcagccctccccttctacaacttccaagacagttactacatcaggtacaacaaataacactgtgactccaacctcacaacctgtgcgaaagtctacctttgatgcagccagtttcattggaggaattgtcctggtcttgggtgtgcaggctgtaattttctttctttataaattctgcaaatctaaagaacgaaattaccacactctgtaaacagacccattgaattaataaggactggtgattcatttgtgtaactcactgaagccaaaatactatcttttaagatgtcccacatggaagacgctattccaggatctttaaatttccatggatgcatataggatgtttgggagcatcatccgtgaagaaaaaatcaattaaatcattgtgttcaacaggaatatttaaaatattctgcatgaatcctgtggctgtcttattttaaatagctgctgctgtgggattatattttttttccttaacatgccaaatataactttctgaaagtgatggaaaatgttgtcttgtgcagacaacatcatggctcttggcagtttaaatttagtaattttaatttagtgaacagaattgagaagaacgtgccaaatgagaatcaattaggtggatttttggctgtcatttcaaaagtggaataaatttattaatttagtagtactaaatggtatccttagattaaaattttgtgcttgataacagctgttttttctacattagaaataagatgccacacaaggaactacattccagatttaaagaaatgaaaggataccattagtgtgtataacagattattgttcatacttgtaaagcatcttatgtcattgagaatataaagaacagtgccttagaagacagtgaaaggtaagctctagcttaatgtctatgatttgttctttgacattaaggaaggtaaggattggtcagaggatgtaacttgatgtgagcagtagtaaacctgttttagatatcatactgttaatattttattgaaaatttatttcagagcggagaaacttaagctaaagtctgttatacagaattgaaagccttcgtatcttgaacctcccaacatttttcttatggctgttgaaaagtatagagctaaattgatttaattacactttcctttgtactttaaaaaaaagtatgctagcactattgtaccttgaaaggatttccaccagactgtcttgagtagtgacttctttggtgaggcaagaaggatatacattattttagaatcatttactatttaaatgagacaatcatattattttagaatcatttattttaaatgagacaatcattttaagttttaagataacagaagtgaccaatgtaatttcacaacacctaaggattttttggttgatcaggttactgtagatttttactgattgtcctggatgaatagactgtgctttttctttttctctcccttccttcttggtttcccatagtataataagcatgcatactttaacttctatagttttctcctttagagggtcgtcttcagttttagaggtttacttctcccttgcctttgactcattggactagtgcagaggctttaagtagtttaaaatgggcttttgcttttctaggtcattaacgttttttatttagtttctttagccaatagtggctgagtttcgcacttgattttcaatattttatagtaagaaatgacaaactgctttgtttcatttcataaacaaactctgcatttagataactattaaaggttgttaagatgaagatttactgtttctttgttactcgttggtacagctgtttgttttacttgcacatttgtacatatacttaatgttttcaagtgccttaattgtttaaaatctctggcttcaaagtttcttggggaaaggtcggtttacctcacattttttgtttccattagtaatattctaggtacctcacaaaatgtattatggtgccatggctgttagtttttagtgagtgctgtaggattaattcgaaaataggcagaattccattcctcccaaggtggcaaaaattagctatactgatgtaattgtcatttacctgggtatgaattccctgacacacattcatgtcaacatatgtagcaaattttgtgaaaacataacaatttgaagcttctgtaattttgagcactgctctaacaacaagcataatataaaattagttagattttgcaagtctacaaatgagctcttgcaacagaactcacagcctttttacttttttcccctaactttagcaatgtagtatcttgagccattaatttttgggtttttttaaaatccagaaggtatatagaaaccttttcagatttttcatctgatttgttcttgcagatgttcttctatcaaataccttattttaccttacagatatttgttgcacaggcagatactgctgtatttagacatttctatttcagttcattaaaaactgcaaaaccaatctgtatcatgtaccaaactgacttaaaataaatctacatgtttattgaattaa

SEQ ID NO: 60 - RNA, 2954 nt, Homo sapiens
  source 1..2954: mol_type = other RNA
ggattgaggggttgactgagcgttgcgagccttagctttctcccgaacgccagcgctgaggacacgatgtcgcggctctcccgctcactgctttgggccgccacctgcctgggcgtgctctgcgtgctgtccgcggacaagaacacgacccagcacccgaacgtgacgactttagcgcccatctccaacgtaacctcggcgccggtgacgtccctcccgctggtcaccactccggcaccagaaacctgtgaaggtcgaaacagctgcgtttcctgttttaatgttagcgttgttaatactacctgcttttggatagaatgtaaagatgagagctattgttcacataactcaacagttagtgattgtcaagtggggaacacgacagacttctgttccgctaaacccacagttcagccctccccttctacaacttccaagacagttactacatcaggtacaacaaataacactgtgactccaacctcacaacctgtgcgaaagtctacctttgatgcagccagtttcattggaggaattgtcctggtcttgggtgtgcaggctgtaattttctttctttataaattctgcaaatctaaagaacgaaattaccacactctgtaaacagacccattgaattaataaggactggtgattcatttgtgtaactcactgaagccaaaatactatcttttaagatgtcccacatggaagacgctattccaggatctttaaatttccatggatgcatataggatgtttgggagcatcatccgtgaagaaaaaatcaattaaatcattgtgttcaacaggaatatttaaaatattctgcatgaatcctgtggctgtcttattttaaatagctgctgctgtgggattatattttttttccttaacatgccaaatataactttctgaaagtgatggaaaatgttgtcttgtgcagacaacatcatggctcttggcagtttaaatttagtaattttaatttagtgaacagaattgagaagaacgtgccaaatgagaatcaattaggtggatttttggctgtcatttcaaaagtggaataaatttattaatttagtagtactaaatggtatccttagattaaaattttgtgcttgataacagctgttttttctacattagaaataagatgccacacaaggaactacattccagatttaaagaaatgaaaggataccattagtgtgtataacagattattgttcatacttgtaaagcatcttatgtcattgagaatataaagaacagtgccttagaagacagtgaaaggtaagctctagcttaatgtctatgatttgttctttgacattaaggaaggtaaggattggtcagaggatgtaacttgatgtgagcagtagtaaacctgttttagatatcatactgttaatattttattgaaaatttatttcagagcggagaaacttaagctaaagtctgttatacagaattgaaagccttcgtatcttgaacctcccaacatttttcttatggctgttgaaaagtatagagctaaattgatttaattacactttcctttgtactttaaaaaaaagtatgctagcactattgtaccttgaaaggatttccaccagactgtcttgagtagtgacttctttggtgaggcaagaaggatatacattattttagaatcatttactatttaaatgagacaatcatattattttagaatcatttattttaaatgagacaatcattttaagttttaagataacagaagtgaccaatgtaatttcacaacacctaaggattttttggttgatcaggttactgtagatttttactgattgtcctggatgaatagactgtgctttttctttttctctcccttccttcttggtttcccatagtataataagcatgcatactttaacttctatagttttctcctttagagggtcgtcttcagttttagaggtttacttctcccttgcctttgactcattggactagtgcagaggctttaagtagtttaaaatgggcttttgcttttctaggtcattaacgttttttatttagtttctttagccaatagtggctgagtttcgcacttgattttcaatattttatagtaagaaatgacaaactgctttgtttcatttcataaacaaactctgcatttagataactattaaaggttgttaagatgaagatttactgtttctttgttactcgttggtacagctgtttgttttacttgcacatttgtacatatacttaatgttttcaagtgccttaattgtttaaaatctctggcttcaaagtttcttggggaaaggtcggtttacctcacattttttgtttccattagtaatattctaggtacctcacaaaatgtattatggtgccatggctgttagtttttagtgagtgctgtaggattaattcgaaaataggcagaattccattcctcccaaggtggcaaaaattagctatactgatgtaattgtcatttacctgggtatgaattccctgacacacattcatgtcaacatatgtagcaaattttgtgaaaacataacaatttgaagcttctgtaattttgagcactgctctaacaacaagcataatataaaattagttagattttgcaagtctacaaatgagctcttgcaacagaactcacagcctttttacttttttcccctaactttagcaatgtagtatcttgagccattaatttttgggtttttttaaaatccagaaggtatatagaaaccttttcagatttttcatctgatttgttcttgcagatgttcttctatcaaataccttattttaccttacagatatttgttgcacaggcagatactgctgtatttagacatttctatttcagttcattaaaaactgcaaaaccaatctgtatcatgtaccaaactgacttaaaataaatctacatgtttattgaa

SEQ ID NO: 61 - RNA, 2936 nt, Homo sapiens
  source 1..2936: mol_type = other RNA
ggattgaggggttgactgagcgttgcgagccttagctttctcccgaacgccagcgctgaggacacgatgtcgcggctctcccgctcactgctttgggccgccacctgcctgggcgtgctctgcgtgctgtccgcggacaagaacacgacccagcacccgaacgtgacgactttagcgcccatctccaacgtaacctcggcgccggtgacgtccctcccgctggtcaccactccggcaccagaaacctgtgaaggtcgaaacagctgcgtttcctgttttaatgttagcgttgttaatactacctgcttttggatagaatgtaaagatgagagctattgttcacataactcaacagttagtgattgtcaagtggggaacacgacagacttctgttccgtttccacggccactccagtgccaacagccaattctacaggtacaacaaataacactgtgactccaacctcacaacctgtgcgaaagtctacctttgatgcagccagtttcattggaggaattgtcctggtcttgggtgtgcaggctgtaattttctttctttataaattctgcaaatctaaagaacgaaattaccacactctgtaaacagacccattgaattaataaggactggtgattcatttgtgtaactcactgaagccaaaatactatcttttaagatgtcccacatggaagacgctattccaggatctttaaatttccatggatgcatataggatgtttgggagcatcatccgtgaagaaaaaatcaattaaatcattgtgttcaacaggaatatttaaaatattctgcatgaatcctgtggctgtcttattttaaatagctgctgctgtgggattatattttttttccttaacatgccaaatataactttctgaaagtgatggaaaatgttgtcttgtgcagacaacatcatggctcttggcagtttaaatttagtaattttaatttagtgaacagaattgagaagaacgtgccaaatgagaatcaattaggtggatttttggctgtcatttcaaaagtggaataaatttattaatttagtagtactaaatggtatccttagattaaaattttgtgcttgataacagctgttttttctacattagaaataagatgccacacaaggaactacattccagatttaaagaaatgaaaggataccattagtgtgtataacagattattgttcatacttgtaaagcatcttatgtcattgagaatataaagaacagtgccttagaagacagtgaaaggtaagctctagcttaatgtctatgatttgttctttgacattaaggaaggtaaggattggtcagaggatgtaacttgatgtgagcagtagtaaacctgttttagatatcatactgttaatattttattgaaaatttatttcagagcggagaaacttaagctaaagtctgttatacagaattgaaagccttcgtatcttgaacctcccaacatttttcttatggctgttgaaaagtatagagctaaattgatttaattacactttcctttgtactttaaaaaaaagtatgctagcactattgtaccttgaaaggatttccaccagactgtcttgagtagtgacttctttggtgaggcaagaaggatatacattattttagaatcatttactatttaaatgagacaatcatattattttagaatcatttattttaaatgagacaatcattttaagttttaagataacagaagtgaccaatgtaatttcacaacacctaaggattttttggttgatcaggttactgtagatttttactgattgtcctggatgaatagactgtgctttttctttttctctcccttccttcttggtttcccatagtataataagcatgcatactttaacttctatagttttctcctttagagggtcgtcttcagttttagaggtttacttctcccttgcctttgactcattggactagtgcagaggctttaagtagtttaaaatgggcttttgcttttctaggtcattaacgttttttatttagtttctttagccaatagtggctgagtttcgcacttgattttcaatattttatagtaagaaatgacaaactgctttgtttcatttcataaacaaactctgcatttagataactattaaaggttgttaagatgaagatttactgtttctttgttactcgttggtacagctgtttgttttacttgcacatttgtacatatacttaatgttttcaagtgccttaattgtttaaaatctctggcttcaaagtttcttggggaaaggtcggtttacctcacattttttgtttccattagtaatattctaggtacctcacaaaatgtattatggtgccatggctgttagtttttagtgagtgctgtaggattaattcgaaaataggcagaattccattcctcccaaggtggcaaaaattagctatactgatgtaattgtcatttacctgggtatgaattccctgacacacattcatgtcaacatatgtagcaaattttgtgaaaacataacaatttgaagcttctgtaattttgagcactgctctaacaacaagcataatataaaattagttagattttgcaagtctacaaatgagctcttgcaacagaactcacagcctttttacttttttcccctaactttagcaatgtagtatcttgagccattaatttttgggtttttttaaaatccagaaggtatatagaaaccttttcagatttttcatctgatttgttcttgcagatgttcttctatcaaataccttattttaccttacagatatttgttgcacaggcagatactgctgtatttagacatttctatttcagttcattaaaaactgcaaaaccaatctgtatcatgtaccaaactgacttaaaataaatctacatgtttattgaa

SEQ ID NO: 62 - RNA, 964 nt, Homo sapiens
  source 1..964: mol_type = other RNA
gctttctcccgaacgccagcgctgaggacacgatgtcgcggctctcccgctcactgctttgggccgccacctgcctgggcgtgctctgcgtgctgtccgcggacaagaacacgacccagcacccgaacgtgacgactttagcgcccatctccaacgtaacctcggcgccggtgacgtccctcccgctggtcaccactccggcaccagaaacctgtgaaggtcgaaacagctgcgtttcctgttttaatgttagcgttgttaatactacctgcttttggatagaatgtaaagatgagagctattgttcacataactcaacagttagtgattgtcaagtggggaacacgacagacttctgttccgtttccacggccactccagtgccaacagccaattctacagctaaacccacagttcagccctccccttctacaacttccaagacagttactacatcagaaataagatgccacacaaggaactacattccagatttaaagaaatgaaaggataccattagtgtgtataacagattattgttcatacttgtaaagcatcttatgtcattgagaatataaagaacagtgccttagaagacagtgaaaggtaagctctagcttaatgtctatgatttgttctttgacattaaggaaggtaaggattggtcagaggatgtaacttgatgtgagcagtagtaaacctgttttagatatcatactgttaatattttattgaaaatttatttcagagcggagaaacttaagctaaagtctgttatacagaattgaaagccttcgtatcttgaacctcccaacatttttcttatggctgttgaaaagtatagagctaaattgatttaattacactttcctttgtactttaaaaaaaagtatgctagcactattgtaccttgaaaggatttccaccagactgtcttgagtagtgacttctttggtgaggcaag

SEQ ID NO: 63 - RNA, 2424 nt, Homo sapiens
  source 1..2424: mol_type = other RNA
agtctcggaggcggcgccgcaggggattgaggggttgactgagcgttgcgagccttagctttctcccgaacgccagcgctgaggacacgatgtcgcggctctcccgctcactgctttgggccgccacctgcctgggcgtgctctgcgtgctgtccgcggacaagaacacgacccagcacccgaacgtgacgactttagcgcccatctccaacgtaacctcggcgccggtgacgtccctcccgctggtcaccactccggcaccagaaacctgtgaaggtcgaaacagctgcgtttcctgttttaatgttagcgttgttaatactacctgcttttggatagaatgtaaagatgagagctattgttcacataactcaacagttagtgattgtcaagtggggaacacgacagacttctgttccgtttccacggccactccagtgccaacagccaattctacagctaaacccacagttcagccctccccttctacaacttccaagacagttactacatcaggtacaacaaataacactgtgactccaacctcacaacctgtgcgaaagtctacctttgatgcagccagtttcattggaggaattgtcctggtcttggaaataagatgccacacaaggaactacattccagatttaaagaaatgaaaggataccattagtgtgtataacagattattgttcatacttgtaaagcatcttatgtcattgagaatataaagaacagtgccttagaagacagtgaaaggtaagctctagcttaatgtctatgatttgttctttgacattaaggaaggtaaggattggtcagaggatgtaacttgatgtgagcagtagtaaacctgttttagatatcatactgttaatattttattgaaaatttatttcagagcggagaaacttaagctaaagtctgttatacagaattgaaagccttcgtatcttgaacctcccaacatttttcttatggctgttgaaaagtatagagctaaattgatttaattacactttcctttgtactttaaaaaaaagtatgctagcactattgtaccttgaaaggatttccaccagactgtcttgagtagtgacttctttggtgaggcaagaaggatatacattattttagaatcatttactatttaaatgagacaatcatattattttagaatcatttattttaaatgagacaatcattttaagttttaagataacagaagtgaccaatgtaatttcacaacacctaaggattttttggttgatcaggttactgtagatttttactgattgtcctggatgaatagactgtgctttttctttttctctcccttccttcttggtttcccatagtataataagcatgcatactttaacttctatagttttctcctttagagggtcgtcttcagttttagaggtttacttctcccttgcctttgactcattggactagtgcagaggctttaagtagtttaaaatgggcttttgcttttctaggtcattaacgttttttatttagtttctttagccaatagtggctgagtttcgcacttgattttcaatattttatagtaagaaatgacaaactgctttgtttcatttcataaacaaactctgcatttagataactattaaaggttgttaagatgaagatttactgtttctttgttactcgttggtacagctgtttgttttacttgcacatttgtacatatacttaatgttttcaagtgccttaattgtttaaaatctctggcttcaaagtttcttggggaaaggtcggtttacctcacattttttgtttccattagtaatattctaggtacctcacaaaatgtattatggtgccatggctgttagtttttagtgagtgctgtaggattaattcgaaaataggcagaattccattcctcccaaggtggcaaaaattagctatactgatgtaattgtcatttacctgggtatgaattccctgacacacattcatgtcaacatatgtagcaaattttgtgaaaacataacaatttgaagcttctgtaattttgagcactgctctaacaacaagcataatataaaattagttagattttgcaagtctacaaatgagctcttgcaacagaactcacagcctttttacttttttcccctaactttagcaatgtagtatcttgagccattaatttttgggtttttttaaaatccagaaggtatatagaaaccttttcagatttttcatctgatttgttcttgcagatgttcttctatcaaataccttattttaccttacagatatttgttgcacaggcagatactgctgtatttagacatttctatttcagttcattaaaaactgcaaaaccaatctgtatcatgtaccaaactgacttaaaataaatctacatgtttattgaattaa

SEQ ID NO: 64 - RNA, 2963 nt, Homo sapiens
  source 1..2963: mol_type = other RNA
agtctcggaggcggcgccgcaggggattgaggggttgactgagcgttgcgagccttagctttctcccgaacgccagcgctgaggacacgatgtcgcggctctcccgctcactgctttgggccgccacctgcctgggcgtgctctgcgtgctgtccgcggacaagaacacgacccagcacccgaacgtgacgactttagcgcccatctccaacgtaacctcggcgccggtgacgtccctcccgctggtcaccactccggcaccagaaacctgtgaaggtcgaaacagctgcgtttcctgttttaatgttagcgttgttaatactacctgcttttggatagaatgtaaagatgagagctattgttcacataactcaacagttagtgattgtcaagtggggaacacgacagacttctgttccgtttccacggccactccagtgccaacagccaattctacaggtacaacaaataacactgtgactccaacctcacaacctgtgcgaaagtctacctttgatgcagccagtttcattggaggaattgtcctggtcttgggtgtgcaggctgtaattttctttctttataaattctgcaaatctaaagaacgaaattaccacactctgtaaacagacccattgaattaataaggactggtgattcatttgtgtaactcactgaagccaaaatactatcttttaagatgtcccacatggaagacgctattccaggatctttaaatttccatggatgcatataggatgtttgggagcatcatccgtgaagaaaaaatcaattaaatcattgtgttcaacaggaatatttaaaatattctgcatgaatcctgtggctgtcttattttaaatagctgctgctgtgggattatattttttttccttaacatgccaaatataactttctgaaagtgatggaaaatgttgtcttgtgcagacaacatcatggctcttggcagtttaaatttagtaattttaatttagtgaacagaattgagaagaacgtgccaaatgagaatcaattaggtggatttttggctgtcatttcaaaagtggaataaatttattaatttagtagtactaaatggtatccttagattaaaattttgtgcttgataacagctgttttttctacattagaaataagatgccacacaaggaactacattccagatttaaagaaatgaaaggataccattagtgtgtataacagattattgttcatacttgtaaagcatcttatgtcattgagaatataaagaacagtgccttagaagacagtgaaaggtaagctctagcttaatgtctatgatttgttctttgacattaaggaaggtaaggattggtcagaggatgtaacttgatgtgagcagtagtaaacctgttttagatatcatactgttaatattttattgaaaatttatttcagagcggagaaacttaagctaaagtctgttatacagaattgaaagccttcgtatcttgaacctcccaacatttttcttatggctgttgaaaagtatagagctaaattgatttaattacactttcctttgtactttaaaaaaaagtatgctagcactattgtaccttgaaaggatttccaccagactgtcttgagtagtgacttctttggtgaggcaagaaggatatacattattttagaatcatttactatttaaatgagacaatcatattattttagaatcatttattttaaatgagacaatcattttaagttttaagataacagaagtgaccaatgtaatttcacaacacctaaggattttttggttgatcaggttactgtagatttttactgattgtcctggatgaatagactgtgctttttctttttctctcccttccttcttggtttcccatagtataataagcatgcatactttaacttctatagttttctcctttagagggtcgtcttcagttttagaggtttacttctcccttgcctttgactcattggactagtgcagaggctttaagtagtttaaaatgggcttttgcttttctaggtcattaacgttttttatttagtttctttagccaatagtggctgagtttcgcacttgattttcaatattttatagtaagaaatgacaaactgctttgtttcatttcataaacaaactctgcatttagataactattaaaggttgttaagatgaagatttactgtttctttgttactcgttggtacagctgtttgttttacttgcacatttgtacatatacttaatgttttcaagtgccttaattgtttaaaatctctggcttcaaagtttcttggggaaaggtcggtttacctcacattttttgtttccattagtaatattctaggtacctcacaaaatgtattatggtgccatggctgttagtttttagtgagtgctgtaggattaattcgaaaataggcagaattccattcctcccaaggtggcaaaaattagctatactgatgtaattgtcatttacctgggtatgaattccctgacacacattcatgtcaacatatgtagcaaattttgtgaaaacataacaatttgaagcttctgtaattttgagcactgctctaacaacaagcataatataaaattagttagattttgcaagtctacaaatgagctcttgcaacagaactcacagcctttttacttttttcccctaactttagcaatgtagtatcttgagccattaatttttgggtttttttaaaatccagaaggtatatagaaaccttttcagatttttcatctgatttgttcttgcagatgttcttctatcaaataccttattttaccttacagatatttgttgcacaggcagatactgctgtatttagacatttctatttcagttcattaaaaactgcaaaaccaatctgtatcatgtaccaaactgacttaaaataaatctacatgtttattgaattaa

SEQ ID NO: 65 - RNA, 2981 nt, Homo sapiens
  source 1..2981: mol_type = other RNA
agtctcggaggcggcgccgcaggggattgaggggttgactgagcgttgcgagccttagctttctcccgaacgccagcgctgaggacacgatgtcgcggctctcccgctcactgctttgggccgccacctgcctgggcgtgctctgcgtgctgtccgcggacaagaacacgacccagcacccgaacgtgacgactttagcgcccatctccaacgtaacctcggcgccggtgacgtccctcccgctggtcaccactccggcaccagaaacctgtgaaggtcgaaacagctgcgtttcctgttttaatgttagcgttgttaatactacctgcttttggatagaatgtaaagatgagagctattgttcacataactcaacagttagtgattgtcaagtggggaacacgacagacttctgttccgctaaacccacagttcagccctccccttctacaacttccaagacagttactacatcaggtacaacaaataacactgtgactccaacctcacaacctgtgcgaaagtctacctttgatgcagccagtttcattggaggaattgtcctggtcttgggtgtgcaggctgtaattttctttctttataaattctgcaaatctaaagaacgaaattaccacactctgtaaacagacccattgaattaataaggactggtgattcatttgtgtaactcactgaagccaaaatactatcttttaagatgtcccacatggaagacgctattccaggatctttaaatttccatggatgcatataggatgtttgggagcatcatccgtgaagaaaaaatcaattaaatcattgtgttcaacaggaatatttaaaatattctgcatgaatcctgtggctgtcttattttaaatagctgctgctgtgggattatattttttttccttaacatgccaaatataactttctgaaagtgatggaaaatgttgtcttgtgcagacaacatcatggctcttggcagtttaaatttagtaattttaatttagtgaacagaattgagaagaacgtgccaaatgagaatcaattaggtggatttttggctgtcatttcaaaagtggaataaatttattaatttagtagtactaaatggtatccttagattaaaattttgtgcttgataacagctgttttttctacattagaaataagatgccacacaaggaactacattccagatttaaagaaatgaaaggataccattagtgtgtataacagattattgttcatacttgtaaagcatcttatgtcattgagaatataaagaacagtgccttagaagacagtgaaaggtaagctctagcttaatgtctatgatttgttctttgacattaaggaaggtaaggattggtcagaggatgtaacttgatgtgagcagtagtaaacctgttttagatatcatactgttaatattttattgaaaatttatttcagagcggagaaacttaagctaaagtctgttatacagaattgaaagccttcgtatcttgaacctcccaacatttttcttatggctgttgaaaagtatagagctaaattgatttaattacactttcctttgtactttaaaaaaaagtatgctagcactattgtaccttgaaaggatttccaccagactgtcttgagtagtgacttctttggtgaggcaagaaggatatacattattttagaatcatttactatttaaatgagacaatcatattattttagaatcatttattttaaatgagacaatcattttaagttttaagataacagaagtgaccaatgtaatttcacaacacctaaggattttttggttgatcaggttactgtagatttttactgattgtcctggatgaatagactgtgctttttctttttctctcccttccttcttggtttcccatagtataataagcatgcatactttaacttctatagttttctcctttagagggtcgtcttcagttttagaggtttacttctcccttgcctttgactcattggactagtgcagaggctttaagtagtttaaaatgggcttttgcttttctaggtcattaacgttttttatttagtttctttagccaatagtggctgagtttcgcacttgattttcaatattttatagtaagaaatgacaaactgctttgtttcatttcataaacaaactctgcatttagataactattaaaggttgttaagatgaagatttactgtttctttgttactcgttggtacagctgtttgttttacttgcacatttgtacatatacttaatgttttcaagtgccttaattgtttaaaatctctggcttcaaagtttcttggggaaaggtcggtttacctcacattttttgtttccattagtaatattctaggtacctcacaaaatgtattatggtgccatggctgttagtttttagtgagtgctgtaggattaattcgaaaataggcagaattccattcctcccaaggtggcaaaaattagctatactgatgtaattgtcatttacctgggtatgaattccctgacacacattcatgtcaacatatgtagcaaattttgtgaaaacataacaatttgaagcttctgtaattttgagcactgctctaacaacaagcataatataaaattagttagattttgcaagtctacaaatgagctcttgcaacagaactcacagcctttttacttttttcccctaactttagcaatgtagtatcttgagccattaatttttgggtttttttaaaatccagaaggtatatagaaaccttttcagatttttcatctgatttgttcttgcagatgttcttctatcaaataccttattttaccttacagatatttgttgcacaggcagatactgctgtatttagacatttctatttcagttcattaaaaactgcaaaaccaatctgtatcatgtaccaaactgacttaaaataaatctacatgtttattgaattaa

SEQ ID NO: 66 - RNA, 2427 nt, Homo sapiens
  source 1..2427: mol_type = other RNA
gcggcgccgcaggggattgaggggttgactgagcgttgcgagccttagctttctcccgaacgccagcgctgaggacacgatgtcgcggctctcccgctcactgctttgggccgccacctgcctgggcgtgctctgcgtgctgtccgcggacaagaacacgacccagcacccgaacgtgacgactttagcgcccatctccaacgtaacctcggcgccggtgacgtccctcccgctggtcaccactccggcaccagaaacctgtgaaggtcgaaacagctgcgtttcctgttttaatgttagcgttgttaatactacctgcttttggatagaatgtaaagatgagagctattgttcacataactcaacagttagtgattgtcaagtggggaacacgacagacttctgttccgtttccacggccactccagtgccaacagccaattctacagctaaacccacagttcagccctccccttctacaacttccaagacagttactacatcaggtacaacaaataacactgtgactccaacctcacaacctgtgcgaaagtctacctttgatgcagccagtttcattggaggaattgtcctggtcttggaaataagatgccacacaaggaactacattccagatttaaagaaatgaaaggataccattagtgtgtataacagattattgttcatacttgtaaagcaccttatgtcattgagaatataaagaacagtgccttagaagacagtgaaaggtaagctctagcttaatgtctatgatttgttctttgacattaaggaaggtaaggattggtcagaggatgtaacttgatgtgagcagtagtaaacctgttttagatatcatactgttaatattttattgaaaatttatttcagagcggagaaacttaagctaaagtctgttatacagaattgaaagccttcgtatcttgaacctcccaacatttttcttatggctgttgaaaagtatagagctaaattgatttaattacactttcctttgtactttaaaaaaaagtatgctagcactattgtaccttgaaaggatttccaccagactgtcttgagtagtgacttctttggtgaggcaagaaggatatacattattttagaatcatttactatttaaatgagacaatcatattattttagaatcatttattttaaatgagacaatcattttaagttttaagataacagaagtgaccaatgtaatttcacaacacctaaggattttttggttgatcaggttactgtagatttttactgattgtcctggatgaatagactgtgctttttctttttctctcccttccttcttggtttcccatagtataataagcatgcatactttaacttctatagttttctcctttagagggtcttcttcagttttagaggtttacttctcccttgcctttgactcattggactagtgcagaggctttaagtagtttaaaatgggcttttgcttttctaggtcattaacgttttttatttagtttctttagccaatagtggctgagtttcgcacttgattttcaatattttatagtaagaaatgacaaactgctttggttcatttcataaacaaactctgcatttagataactattaaaggttgttaagatgaagatttactgtttctttgttactcgttggtacagctgtttgttttacttgcacatttgtagatatacttaatgttttcaagtgccttaattgtttaaaatctctggcttcaaagtttcttggggaaaggtcggtttacctcacattttttgtttccattagtaatattctaggtacctcacaaaatgtattatggtgccatggctgttagtttttagtgagtgctgtaggattaattcgaaaataggcagaattccattcctcccaaggtggcaaaaattagctatactgatgtaattgtcatttacctgggtatgaattccctgacacacattcatgtcaacatatgtagcaaattttgtgaaaacacaacaatttgaagcttctgtaattttgagcactgctctaacaacaagcataatataaaattagttagattttgcaagtctacaaatgagctcttgcaacagaactcacagcctttttacttttttcccctaactttagcaatgtagtatcttgagccattaatttttgggtttttttaaaatccagaaggtatatagaaaccttttcagatttttcatctgatttgttcttgcagatgttcttctatcaaataccttattttaccttacagatatttgttgcacaggcagatactgctgtatttagacatttctatttcagttcattaaaaactgcaaaaccaatctgtatcatgtaccaaactgacttaaaataaatctacatgtttattgaattaaaacaaaaaaaaaa

SEQ ID NO: 67 - RNA, 2929 nt, Homo sapiens
  source 1..2929: mol_type = other RNA
atgtcgcggctctcccgctcactgctttgggccgccacctgcctgggcgtgctctgcgtgctgtccgcggacaagaacacgacccagcacccgaacgtgacgactttagcgcccatctccaacgtaacctcggcgccggtgacgtccctcccgctggtcaccactccggcaccagaaacctgtgaaggtcgaaacagctgcgtttcctgttttaatgttagcgttgttaatactacctgcttttggatagaatgtaaagatgagagctattgttcacataactcaacagttagtgattgtcaagtggggaacacgacagacttctgttccgtttccacggccactccagtgccaacagccaattctacagctaaacccacagttcagccctccccttctacaacttccaagacagttactacatcaggtacaacaaataacactgtgactccaacctcacaacctgtgcgaaagtctacctttgatgcagccagtttcattggaggaattgtcctggtcttgggtgtgcaggctgtaattttctttctttataaattctgcaaatctaaagaacgaaattaccacactctgtaaacagacccattgaattaataaggactggtgattcatttgtgtaactcactgaagccaaaatactatcttttaagatgtcccacatggaagacgctattccaggatctttaaatttccatggatgcatataggatgtttgggagcatcatccgtgaagaaaaaatcaattaaatcattgtgttcaacaggaatatttaaaatattctgcatgaatcctgtggctgtcttattttaaatagctgctgctgtgggattatattttttttccttaacatgccaaatataactttctgaaagtgatggaaaatgttgtcttgtgcagacaacatcatggctcttggcagtttaaatttagtaattttaatttagtgaacagaattgagaagaacgtgccaaatgagaatcaattaggtggatttttggctgtcatttcaaaagtggaataaatttattaatttagtagtactaaatggtatccttagattaaaattttgtgcttgataacagctgttttttctacattagaaataagatgccacacaaggaactacattccagatttaaagaaatgaaaggataccattagtgtgtataacagattattgttcatacttgtaaagcatcttatgtcattgagaatataaagaacagtgccttagaagacagtgaaaggtaagctctagcttaatgtctatgatttgttctttgacattaaggaaggtaaggattggtcagaggatgtaacttgatgtgagcagtagtaaacctgttttagatatcatactgttaatattttattgaaaatttatttcagagcggagaaacttaagctaaagtctgttatacagaattgaaagccttcgtatcttgaacctcccaacatttttcttatggctgttgaaaagtatagagctaaattgatttaattacactttcctttgtactttaaaaaaaagtatgctagcactattgtaccttgaaaggatttccaccagactgtcttgagtagtgacttctttggtgaggcaagaaggatatacattattttagaatcatttactatttaaatgagacaatcatattattttagaatcatttattttaaatgagacaatcattttaagttttaagataacagaagtgaccaatgtaatttcacaacacctaaggattttttggttgatcaggttactgtagatttttactgattgtcctggatgaatagactgtgctttttctttttctctcccttccttcttggtttcccatagtataataagcatgcatactttaacttctatagttttctcctttagagggtcgtcttcagttttagaggtttacttctcccttgcctttgactcattggactagtgcagaggctttaagtagtttaaaatgggcttttgcttttctaggtcattaacgttttttatttagtttctttagccaatagtggctgagtttcgcacttgattttcaatattttatagtaagaaatgacaaactgctttgtttcatttcataaacaaactctgcatttagataactattaaaggttgttaagatgaagatttactgtttctttgttactcgttggtacagctgtttgttttacttgcacatttgtacatatacttaatgttttcaagtgccttaattgtttaaaatctctggcttcaaagtttcttggggaaaggtcggtttacctcacattttttgtttccattagtaatattctaggtacctcacaaaatgtattatggtgccatggctgttagtttttagtgagtgctgtaggattaattcgaaaataggcagaattccattcctcccaaggtggcaaaaattagctatactgatgtaattgtcatttacctgggtatgaattccctgacacacattcatgtcaacatatgtagcaaattttgtgaaaacataacaatttgaagcttctgtaattttgagcactgctctaacaacaagcataatataaaattagttagattttgcaagtctacaaatgagctcttgcaacagaactcacagcctttttacttttttcccctaactttagcaatgtagtatcttgagccattaatttttgggtttttttaaaatccagaaggtatatagaaaccttttcagatttttcatctgatttgttcttgcagatgttcttctatcaaataccttattttaccttacagatatttgttgcacaggcagatactgctgtatttagacatttctatttcagttcattaaaaactgcaaaaccaatctgtatcatgtaccaaactgacttaaaataaatctacatgtttattgaatt

SEQ ID NO: 68 - RNA, 2950 nt, Homo sapiens
  source 1..2950: mol_type = other RNA
cggcgccgcaggggattgaggggttgactgagcgttgcgagccttagctttctcccgaacgccagcgctgaggacacgatgtcgcggctctcccgctcactgctttgggccgccacctgcctgggcgtgctctgcgtgctgtccgcggacaagaacacgacccagcacccgaacgtgacgactttagcgcccatctccaacgtaacctcggcgccggtgacgtccctcccgctggtcaccactccggcaccagaaacctgtgaaggtcgaaacagctgcgtttcctgttttaatgttagcgttgttaatactacctgcttttggatagaatgtaaagatgagagctattgttcacataactcaacagttagtgattgtcaagtggggaacacgacagacttctgttccgtttccacggccactccagtgccaacagccaattctacaggtacaacaaataacactgtgactccaacctcacaacctgtgcgaaagtctacctttgatgcagccagtttcattggaggaattgtcctggtcttgggtgtgcaggctgtaattttctttctttataaattctgcaaatctaaagaacgaaattaccacactctgtaaacagacccattgaattaataaggactggtgattcatttgtgtaactcactgaagccaaaatactatcttttaagatgtcccacatggaagacgctattccaggatctttaaatttccatggatgcatataggatgtttgggagcatcatccgtgaagaaaaaatcaattaaatcattgtgttcaacaggaatatttaaaatattctgcatgaatcctgtggctgtcttattttaaatagctgctgctgtgggattatattttttttccttaacatgccaaatataactttctgaaagtgatggaaaatgttgtcttgtgcagacaacatcatggctcttggcagtttaaatttagtaattttaatttagtgaacagaattgagaagaacgtgccaaatgagaatcaattaggtggatttttggctgtcatttcaaaagtggaataaatttattaatttagtagtactaaatggtatccttagattaaaattttgtgcttgataacagctgttttttctacattagaaataagatgccacacaaggaactacattccagatttaaagaaatgaaaggataccattagtgtgtataacagattattgttcatacttgtaaagcatcttatgtcattgagaatataaagaacagtgccttagaagacagtgaaaggtaagctctagcttaatgtctatgatttgttctttgacattaaggaaggtaaggattggtcagaggatgtaacttgatgtgagcagtagtaaacctgttttagatatcatactgttaatattttattgaaaatttatttcagagcggagaaacttaagctaaagtctgttatacagaattgaaagccttcgtatcttgaacctcccaacatttttcttatggctgttgaaaagtatagagctaaattgatttaattacactttcctttgtactttaaaaaaaagtatgctagcactattgtaccttgaaaggatttccaccagactgtcttgagtagtgacttctttggtgaggcaagaaggatatacattattttagaatcatttactatttaaatgagacaatcatattattttagaatcatttattttaaatgagacaatcattttaagttttaagataacagaagtgaccaatgtaatttcacaacacctaaggattttttggttgatcaggttactgtagatttttactgattgtcctggatgaatagactgtgctttttctttttctctcccttccttcttggtttcccatagtataataagcatgcatactttaacttctatagttttctcctttagagggtcgtcttcagttttagaggtttacttctcccttgcctttgactcattggactagtgcagaggctttaagtagtttaaaatgggcttttgcttttctaggtcattaacgttttttatttagtttctttagccaatagtggctgagtttcgcacttgattttcaatattttatagtaagaaatgacaaactgctttgtttcatttcataaacaaactctgcatttagataactattaaaggttgttaagatgaagatttactgtttctttgttactcgttggtacagctgtttgttttacttgcacatttgtacatatacttaatgttttcaagtgccttaattgtttaaaatctctggcttcaaagtttcttggggaaaggtcggtttacctcacattttttgtttccattagtaatattctaggtacctcacaaaatgtattatggtgccatggctgttagtttttagtgagtgctgtaggattaattcgaaaataggcagaattccattcctcccaaggtggcaaaaattagctatactgatgtaattgtcatttacctgggtatgaattccctgacacacattcatgtcaacatatgtagcaaattttgtgaaaacataacaatttgaagcttctgtaattttgagcactgctctaacaacaagcataatataaaattagttagattttgcaagtctacaaatgagctcttgcaacagaactcacagcctttttacttttttcccctaactttagcaatgtagtatcttgagccattaatttttgggtttttttaaaatccagaaggtatatagaaaccttttcagatttttcatctgatttgttcttgcagatgttcttctatcaaataccttattttaccttacagatatttgttgcacaggcagatactgctgtatttagacatttctatttcagttcattaaaaactgcaaaaccaatctgtatcatgtaccaaactgacttaaaataaatctacatgtttattgaatt

SEQ ID NO: 69 - RNA, 2968 nt, Homo sapiens
  source 1..2968: mol_type = other RNA
cggcgccgcaggggattgaggggttgactgagcgttgcgagccttagctttctcccgaacgccagcgctgaggacacgatgtcgcggctctcccgctcactgctttgggccgccacctgcctgggcgtgctctgcgtgctgtccgcggacaagaacacgacccagcacccgaacgtgacgactttagcgcccatctccaacgtaacctcggcgccggtgacgtccctcccgctggtcaccactccggcaccagaaacctgtgaaggtcgaaacagctgcgtttcctgttttaatgttagcgttgttaatactacctgcttttggatagaatgtaaagatgagagctattgttcacataactcaacagttagtgattgtcaagtggggaacacgacagacttctgttccgctaaacccacagttcagccctccccttctacaacttccaagacagttactacatcaggtacaacaaataacactgtgactccaacctcacaacctgtgcgaaagtctacctttgatgcagccagtttcattggaggaattgtcctggtcttgggtgtgcaggctgtaattttctttctttataaattctgcaaatctaaagaacgaaattaccacactctgtaaacagacccattgaattaataaggactggtgattcatttgtgtaactcactgaagccaaaatactatcttttaagatgtcccacatggaagacgctattccaggatctttaaatttccatggatgcatataggatgtttgggagcatcatccgtgaagaaaaaatcaattaaatcattgtgttcaacaggaatatttaaaatattctgcatgaatcctgtggctgtcttattttaaatagctgctgctgtgggattatattttttttccttaacatgccaaatataactttctgaaagtgatggaaaatgttgtcttgtgcagacaacatcatggctcttggcagtttaaatttagtaattttaatttagtgaacagaattgagaagaacgtgccaaatgagaatcaattaggtggatttttggctgtcatttcaaaagtggaataaatttattaatttagtagtactaaatggtatccttagattaaaattttgtgcttgataacagctgttttttctacattagaaataagatgccacacaaggaactacattccagatttaaagaaatgaaaggataccattagtgtgtataacagattattgttcatacttgtaaagcatcttatgtcattgagaatataaagaacagtgccttagaagacagtgaaaggtaagctctagcttaatgtctatgatttgttctttgacattaaggaaggtaaggattggtcagaggatgtaacttgatgtgagcagtagtaaacctgttttagatatcatactgttaatattttattgaaaatttatttcagagcggagaaacttaagctaaagtctgttatacagaattgaaagccttcgtatcttgaacctcccaacatttttcttatggctgttgaaaagtatagagctaaattgatttaattacactttcctttgtactttaaaaaaaagtatgctagcactattgtaccttgaaaggatttccaccagactgtcttgagtagtgacttctttggtgaggcaagaaggatatacattattttagaatcatttactatttaaatgagacaatcatattattttagaatcatttattttaaatgagacaatcattttaagttttaagataacagaagtgaccaatgtaatttcacaacacctaaggattttttggttgatcaggttactgtagatttttactgattgtcctggatgaatagactgtgctttttctttttctctcccttccttcttggtttcccatagtataataagcatgcatactttaacttctatagttttctcctttagagggtcgtcttcagttttagaggtttacttctcccttgcctttgactcattggactagtgcagaggctttaagtagtttaaaatgggcttttgcttttctaggtcattaacgttttttatttagtttctttagccaatagtggctgagtttcgcacttgattttcaatattttatagtaagaaatgacaaactgctttgtttcatttcataaacaaactctgcatttagataactattaaaggttgttaagatgaagatttactgtttctttgttactcgttggtacagctgtttgttttacttgcacatttgtacatatacttaatgttttcaagtgccttaattgtttaaaatctctggcttcaaagtttcttggggaaaggtcggtttacctcacattttttgtttccattagtaatattctaggtacctcacaaaatgtattatggtgccatggctgttagtttttagtgagtgctgtaggattaattcgaaaataggcagaattccattcctcccaaggtggcaaaaattagctatactgatgtaattgtcatttacctgggtatgaattccctgacacacattcatgtcaacatatgtagcaaattttgtgaaaacataacaatttgaagcttctgtaattttgagcactgctctaacaacaagcataatataaaattagttagattttgcaagtctacaaatgagctcttgcaacagaactcacagcctttttacttttttcccctaactttagcaatgtagtatcttgagccattaatttttgggtttttttaaaatccagaaggtatatagaaaccttttcagatttttcatctgatttgttcttgcagatgttcttctatcaaataccttattttaccttacagatatttgttgcacaggcagatactgctgtatttagacatttctatttcagttcattaaaaactgcaaaaccaatctgtatcatgtaccaaactgacttaaaataaatctacatgtttattgaatt

SEQ ID NO: 70 - RNA, 3010 nt, Homo sapiens
  source 1..3010: mol_type = other RNA
gattgaggggttgactgagcgttgcgagccttagctttctcccgaacgccagcgctgaggacacgatgtcgcggctctcccgctcactgctttgggccgccacctgcctgggcgtgctctgcgtgctgtccgcggacaagaacacgacccagcacccgaacgtgacgactttagcgcccatctccaacgtaacctcggcgccggtgacgtccctcccgctggtcaccactccggcaccagaaacctgtgaaggtcgaaacagctgcgtttcctgttttaatgttagcgttgttaatactacctgcttttggatagaatgtaaagatgagagctattgttcacataactcaacagttagtgattgtcaagtggggaacacgacagacttctgttccgtttccacggccactccagtgccaacagccaattctacagctaaacccacagttcagccctccccttctacaacttccaagacagttactacatcaggtacaacaaataacactgtgactccaacctcacaacctgtgcgaaagtctacctttgatgcagccagtttcattggaggaattgtcctggtcttgggtgtgcaggctgtaattttctttctttataaattctgcaaatctaaagaacgaaattaccacactctgtaaacagacccattgaattaataaggactggtgattcatttgtgtaactcactgaagccaaaatactatcttttaagatgtcccacatggaagacgctattccaggatctttaaatttccatggatgcatataggatgtttgggagcatcatccgtgaagaaaaaatcaattaaatcattgtgttcaacaggaatatttaaaatattctgcatgaatcctgtggctgtcttattttaaatagctgctgctgtgggattatattttttttccttaacatgccaaatataactttctgaaagtgatggaaaatgttgtcttgtgcagacaacatcatggctcttggcagtttaaatttagtaattttaatttagtgaacagaattgagaagaacgtgccaaatgagaatcaattaggtggatttttggctgtcatttcaaaagtggaataaatttattaatttagtagtactaaatggtatccttagattaaaattttgtgcttgataacagctgttttttctacattagaaataagatgccacacaaggaactacattccagatttaaagaaatgaaaggataccattagtgtgtataacagattattgttcatacttgtaaagcatcttatgtcattgagaatataaagaacagtgccttagaagacagtgaaaggtaagctctagcttaatgtctatgatttgttctttgacattaaggaaggtaaggattggtcagaggatgtaacttgatgtgagcagtagtaaacctgttttagatatcatactgttaatattttattgaaaatttatttcagagcggagaaacttaagctaaagtctgttatacagaattgaaagccttcgtatcttgaacctcccaacatttttcttatggctgttgaaaagtatagagctaaattgatttaattacactttcctttgtactttaaaaaaaagtatgctagcactattgtaccttgaaaggatttccaccagactgtcttgagtagtgacttctttggtgaggcaagaaggatatacattattttagaatcatttactatttaaatgagacaatcatattattttagaatcatttattttaaatgagacaatcattttaagttttaagataacagaagtgaccaatgtaatttcacaacacctaaggattttttggttgatcaggttactgtagatttttactgattgtcctggatgaatagactgtgctttttctttttctctcccttccttcttggtttcccatagtataataagcatgcatactttaacttctatagttttctcctttagagggtcgtcttcagttttagaggtttacttctcccttgcctttgactcattggactagtgcagaggctttaagtagtttaaaatgggcttttgcttttctaggtcattaacgttttttatttagtttctttagccaatagtggctgagtttcgcacttgattttcaatattttatagtaagaaatgacaaactgctttgtttcatttcataaacaaactctgcatttagataactattaaaggttgttaagatgaagatttactgtttctttgttactcgttggtacagctgtttgttttacttgcacatttgtacatatacttaatgttttcaagtgccttaattgtttaaaatctctggcttcaaagtttcttggggaaaggtcggtttacctcacattttttgtttccattagtaatattctaggtacctcacaaaatgtattatggtgccatggctgttagtttttagtgagtgctgtaggattaattcgaaaataggcagaattccattcctcccaaggtggcaaaaattagctatactgatgtaattgtcatttacctgggtatgaattccctgacacacattcatgtcaacatatgtagcaaattttgtgaaaacataacaatttgaagcttctgtaattttgagcactgctctaacaacaagcataatataaaattagttagattttgcaagtctacaaatgagctcttgcaacagaactcacagcctttttacttttttcccctaactttagcaatgtagtatcttgagccattaatttttgggtttttttaaaatccagaaggtatatagaaaccttttcagatttttcatctgatttgttcttgcagatgttcttctatcaaataccttattttaccttacagatatttgttgcacaggcagatactgctgtatttagacatttctatttcagttcattaaaaactgcaaaaccaatctgtatcatgtaccaaactgacttaaaataaatctacatgtttattgaaaaaaaaaaaaaaaaaaaa

SEQ ID NO: 71 - RNA, 1294 nt, Homo sapiens
  source 1..1294: mol_type = other RNA
gtagtctcggaggcggcgccgcaggggattgaggggttgactgagcgttgcgagccttagctttctcccgaacgccagcgctgaggacacgatgtcgcggctctcccgctcactgctttgggccgccacctgcctgggcgtgctctgcgtgctgtccgcggacaagaacacgacccagcacccgaacgtgacgactttagcgcccatctccaacgtaacctcggcgccggtgacgtccctcccgctggtcaccactccggcaccagaaacctgtgaaggtcgaaacagctgcgtttcctgttttaatgttagcgttgttaatactacctgcttttggatagaatgtaaagatgagagctattgttcacataactcaacagttagtgattgtcaagtggggaacacgacagacttctgttccgtttccacggccactccagtgccaacagccaattctacaggtacaacaaataacactgtgactccaacctcacaacctgtgcgaaagtctaccttctttgacattaaggaaggtaaggattggtcagaggatgtaacttgatgtgagcagtagtaaacctgttttagatatcatactgttaatattttattgaaaatttatttcagagcggagaaacttaagctaaagtctgttatacagaattgaaagccttcgtatcttgaacctcccaacatttttcttatggctgttgaaaagtatagagctaaattgatttaattacactttcctttgtactttaaaaaaaagtatgctagcactattgtaccttgaaaggatttccaccagactgtcttgagtagtgacttctttggtgaggcaagaaggatatacattattttagaatcatttactatttaaatgagacaatcatattattttagaatcatttattttaaatgagacaatcattttaagttttaagataacagaagtgaccaatgtaatttcacaacacctaaggattttttggttgatcaggttactgtagatttttactgattgtcctggatgaatagactgtgctttttctttttctctcccttccttcttggtttcccatagtataataagcatgcatactttaacttctatagttttctcctttagagggtcgtcttcagttttagaggtttacttctcccttgcctttgactcattggactagtgcagaggctttaagtagtttaaaatgggcttttgcttttctaggtcattaacgttttttatttagtttctttagccaatagtggctgagtttcgcacttgattttc

SEQ ID NO: 72 - RNA, 1386 nt, Homo sapiens
  source 1..1386: mol_type = other RNA
agctttctcccgaacgccagcgctgaggacacgatgtcgcggctctcccgctcactgctttgggccgccacctgcctgggcgtgctctgcgtgctgtccgcggacaagaacacgacccagcacccgaacgtgacgactttagcgcccatctccaacgtaacctcggcgccggtgacgtccctcccgctggtcaccactccggcaccagaaacctgtgaaggtcgaaacagctgcgtttcctgttttaatgttagcgttgttaatactacctgcttttggatagaatgtaaagatgagagctattgttcacataactcaacagttagtgattgtcaagtggggaacacgacagacttctgttccgtttccacggccactccagtgccaacagccaattctacaggtacaacaaataacactgtgactccaacctcacaacctgtgcgaaagtctacctttgatgcagccagtttcattggaggaattgtcctggtcttgggtgtgcaggctgtaattttctttctttataaattctgcaaatctaaagaacgaaattaccacactctgtaaacagacccattgaattaataaggactggtgattcatttgtgtaactcactgaagccaaaatactatcttttaagatgtcccacatggaagacgctattccaggatctttaaatttccatggatgcatataggatgtttgggagcataatccgtgaagaaaaaatcaattaaatcattgtgttcaacaggaatatttaaaatattctgcatgaatcctgtggctgtcttattttaaatagctgctgctgtgggattatattttttttccttaacatgccaaatataactttctgaaagtgatggaaaatgttgtcttgtgcagacaacatcatggctcttggcagtttaaatttagtaattttaatttagtgagcagaattgagaagaacgtgccaaatgagaatcaattaggtggatttttggctgtcatttcaaaagtggaataaatttattaatttagtagtactaaatggtatccttagattaaaattttgtgcttgataacagctgttttttctacattagaaataagatgccacacaaggaactacattccagatttaaagaaatgaaaggataccattagtgtgtataacagattattgttcatacttgtaaagcaccttatgtcattgagaatataaagaacagtgccttagaagacagtgaaaggtaagctctagcttaatgtctatgatttgttctttgacattaaggaaggtaaggattggtcagaggatgtaacttgatgtgagcagtagtaaacctgttttagatatcgtactgttaatattttattgaaaatttatttcagag

SEQ ID NO: 73 - RNA, 1386 nt, Homo sapiens
  source 1..1386: mol_type = other RNA
gctttctcccgaacgccagcgctgaggacacgatgtcgcggctctcccgctcactgctttgggccgccacctgcctgggcgtgctctgcgtgctgtccgcggacaagaacacgacccagcacccgaacgtgacgactttagcgcccatctccaacgtaacctcggcgccggtgacgtccctcccgctggtcaccactccggcaccagaaacctgtgaaggtcgaaacagctgcgtttcctgttttaatgttagcgttgttaatactacctgcttttggatagaatgtaaagatgagagctattgttcacataactcaacagttagtgattgtcaagtggggaacacgacagacttctgttccgctaaacccacagttcagccctccccttctacaacttccaagacagttactacatcaggtacaacaaataacactgtgactccaacctcacaacctgtgcgaaagtctacctttgatgcagccagtttcattggaggaattgtcctggtcttgggtgtgcaggctgtaattttctttctttataaattctgcaaatctaaagaacgaaattaccacactctgtaaacagacccattgaattaataaggactggtgattcatttgtgtaactcactgaagccaaaatactatcttttaagatgtcccacatggaagacgctattccaggatctttaaatttccatggatgcatataggatgtttgggagcatcatccgtgaagaaaaaatcaattaaatcattgtgttcaacaggaatatttaaaatattctgcatgaatcctgtggctgtcttattttaaatagctgctgctgtgggattatattttttttccttaacatgccaaatataactttctgaaagtgatggaaaatgttgtcttgtgcagacaacatcatggctcttggcagtttaaatttagtaattttaatttagtgaacagaattgagaagaacgtgccaaatgagaatcaattaggtggatttttggctgtcatttcaaaagtggaataaatttattaatttagtagtactaaatggtatccttagattaaaattttgtgcttgataacagctgttttttctacattagaaataagatgccacacaaggaactacattccagatttaaagaaatgaaaggataccattagtgtgtacaacagattattgttcatacttgtaaagcaccttatgtcattgagaatataaagaacagtgccttagaagacagtgaaaggtaagctctagcttaatgtctatgatttgttctttgacattaaggaaggtaaggattggtcagaggatgtaacttgatgtgagcagtagtaaacctgttttagatatcatactgttaatattttatt

SEQ ID NO: 74 - RNA, 537 nt, Homo sapiens
  source 1..537: mol_type = other RNA
atgtcgcggctctcccgctcactgctttgggccgccacctgcctgggcgtgctctgcgtgctgtccgcggacaagaacacgacccagcacccgaacgtgacgactttagcgcccatctccaacgtaacctcggcgccggtgacgtccctcccgctggtcaccactccggcaccagaaacctgtgaaggtcgaaacagctgcgtttcctgttttaatgttagcgttgttaatactacctgcttttggatagaatgtaaagatgagagctattgttcacataactcaacagttagtgattgtcaagtggggaacacgacagacttctgttccgtttccacggccactccagtgccaacagccaattctacaggtacaacaaataacactgtgactccaacctcacaacctgtgcgaaagtctacctttgatgcagccagtttcattggaggaattgtcctggtcttgggtgtgcaggctgtaattttctttctttataaattctgcaaatctaaagaacgaaattaccacactctgtaa

SEQ ID NO: 75 - RNA, 594 nt, Homo sapiens
  source 1..594: mol_type = other RNA
atgtcgcggctctcccgctcactgctttgggccgccacctgcctgggcgtgctctgcgtgctgtccgcggacaagaacacgacccagcacccgaacgtgacgactttagcgcccatctccaacgtaacctcggcgccggtgacgtccctcccgctggtcaccactccggcaccagaaacctgtgaaggtcgaaacagctgcgtttcctgttttaatgttagcgttgttaatactacctgcttttggatagaatgtaaagatgagagctattgttcacataactcaacagttagtgattgtcaagtggggaacacgacagacttctgttccgtttccacggccactccagtgccaacagccaattctacagctaaacccacagttcagccctccccttctacaacttccaagacagttactacatcaggtacaacaaataacactgtgactccaacctcacaacctgtgcgaaagtctacctttgatgcagccagtttcattggaggaattgtcctggtcttgggtgtgcaggctgtaattttctttctttataaattctgcaaatctaaagaacgaaattaccacactctgtaa

SEQ ID NO: 76 - RNA, 590 nt, Homo sapiens
  source 1..590: mol_type = other RNA
atgtcgcggctctcccgctcactgctttgggccgccacctgcctgggcgtgctctgcgtgctgtccgcggacaagaacacgacccagcacccgaacgtgacgactttagcgcccatctccaacgtaacctcggcgccggtgacgtccctcccgctggtcaccactccggcaccagaaacctgtgaaggtcgaaacagctgcgtttcctgttttaatgttagcgttgttaatactacctgcttttggatagaatgtaaagatgagagctactgttcacataactcaacagttagtgattgtcaagtggggaacacgacagacttctgttccgtttccacggcccagtgccaacagccaattctacagctaaacccacagttcagccctccccttctacaacttccaagacagttactacatcaggtacaacaaataacactgtgactccaacctcacaacctgtgcgaaagtctacctttgatgcagccagtttcattggaggaattgtcctggtcttgggtgtgcaggctgtaattttctttctttataaattctgcaaatctaaagaacgaaattaccacactctgtaa

SEQ ID NO: 77 - RNA, 683 nt, Homo sapiens
  source 1..683: mol_type = other RNA
agtctcggaggcggcgccgcaggggattgaggggttgactgagcgttgcgagccttagctttctcccgaacgccagcgctgaggacacgatgtcgcggctctcccgctcactgctttgggccgccacctgcctgggcgtgctctgcgtgctgtccgcggacaagaacacgacccagcacccgaacgtgacgactttagcgcccatctccaacgtaacctcggcgccggtgacgtccctcccgctggtcaccactccggcaccagaaacctgtgaaggtcgaaacagctgcgtttcctgttttaatgttagcgttgttaatactacctgcttttggatagaatgtaaagatgagagctattgttcacataactcaacagttagtgattgtcaagtggggaacacgacagacttctgttccgtttccacggccactccagtgccaacagccaattctacagctaaacccacagttcagccctccccttctacaacttccaagacagttactacatcaggtacaacaaataacactgtgactccaacctcacaacctgtgcgaaagtctacctttgatgcagccagtttcattggaggaattgtcctggtcttgggtgtgcaggctgtaattttctttctttataaattctgcaaatctaaagaacgaaattaccacactctgtaa

SEQ ID NO: 78 - RNA, 3106 nt, Homo sapiens
  source 1..3106: mol_type = other RNA
atcgtccgagccccacctccctcctcttcgcccccgcacgccgaaaacaggggcctctcacgtgacccctgcgcgctcccgcgggggagcgtagtctcggaggcggcgccgcaggggattgaggggttgactgagcgttgcgagccttagctttctcccgaacgccagcgctgaggacacgatgtcgcggctctcccgctcactgctttgggccgccacctgcctgggcgtgctctgcgtgctgtccgcggacaagaacacgacccagcacccgaacgtgacgactttagcgcccatctccaacgtaacctcggcgccggtgacgtccctcccgctggtcaccactccggcaccagaaacctgtgaaggtcgaaacagctgcgtttcctgttttaatgttagcgttgttaatactacctgcttttggatagaatgtaaagatgagagctattgttcacataactcaacagttagtgattgtcaagtggggaacacgacagacttctgttccgtttccacggcccagtgccaacagccaattctacagctaaacccacagttcagccctccccttctacaacttccaagacagttactacatcaggtacaacaaataacactgtgactccaacctcacaacctgtgcgaaagtctacctttgatgcagccagtttcattggaggaattgtcctggtcttgggtgtgcaggctgtaattttctttctttataaattctgcaaatctaaagaacgaaattaccacactctgtaaacagacccattgaattaataaggactggtgattcatttgtgtaactcactgaagccaaaatactatcttttaagatgtcccacatggaagacgctattccaggatctttaaatttccatggatgcatataggatgtttgggagcatcatccgtgaagaaaaaatcaattaaatcattgtgttcaacaggaatatttaaaatattctgcatgaatcctgtggctgtcttattttaaatagctgctgctgtgggattatattttttttccttaacatgccaaatataactttctgaaagtgatggaaaatgttgtcttgtgcagacaacatcatggctcttggcagtttaaatttagtaattttaatttagtgaacagaattgagaagaacgtgccaaatgagaatcaattaggtggatttttggctgtcatttcaaaagtggaataaatttattaatttagtagtactaaatggtatccttagattaaaattttgtgcttgataacagctgttttttctacattagaaataagatgccacacaaggaactacattccagatttaaagaaatgaaaggataccattagtgtgtataacagattattgttcatacttgtaaagcatcttatgtcattgagaatataaagaacagtgccttagaagacagtgaaaggtaagctctagcttaatgtctatgatttgttctttgacattaaggaaggtaaggattggtcagaggatgtaacttgatgtgagcagtagtaaacctgttttagatatcatactgttaatattttattgaaaatttatttcagagcggagaaacttaagctaaagtctgttatacagaattgaaagccttcgtatcttgaacctcccaacatttttcttatggctgttgaaaagtatagagctaaattgatttaattacactttcctttgtactttaaaaaaaagtatgctagcactattgtaccttgaaaggatttccaccagactgtcttgagtagtgacttctttggtgaggcaagaaggatatacattattttagaatcatttactatttaaatgagacaatcatattattttagaatcatttattttaaatgagacaatcattttaagttttaagataacagaagtgaccaatgtaatttcacaacacctaaggattttttggttgatcaggttactgtagatttttactgattgtcctggatgaatagactgtgctttttctttttctctcccttccttcttggtttcccatagtataataagcatgcatactttaacttctatagttttctcctttagagggtcgtcttcagttttagaggtttacttctcccttgcctttgactcattggactagtgcagaggctttaagtagtttaaaatgggcttttgcttttctaggtcattaacgttttttatttagtttctttagccaatagtggctgagtttcgcacttgattttcaatattttatagtaagaaatgacaaactgctttgtttcatttcataaacaaactctgcatttagataactattaaaggttgttaagatgaagatttactgtttctttgttactcgttggtacagctgtttgttttacttgcacatttgtacatatacttaatgttttcaagtgccttaattgtttaaaatctctggcttcaaagtttcttggggaaaggtcggtttacctcacattttttgtttccattagtaatattctaggtacctcacaaaatgtattatggtgccatggctgttagtttttagtgagtgctgtaggattaattcgaaaataggcagaattccattcctcccaaggtggcaaaaattagctatactgatgtaattgtcatttacctgggtatgaattccctgacacacattcatgtcaacatatgtagcaaattttgtgaaaacataacaatttgaagcttctgtaattttgagcactgctctaacaacaagcataatataaaattagttagattttgcaagtctacaaatgagctcttgcaacagaactcacagcctttttacttttttcccctaactttagcaatgtagtatcttgagccattaatttttgggtttttttaaaatccagaaggtatatagaaaccttttcagatttttcatctgatttgttcttgcagatgttcttctatcaaataccttattttaccttacagatatttgttgcacaggcagatactgctgtatttagacatttctatttcagttcattaaaaactgcaaaaccaatctgtatcatgtaccaaactgacttaaaataaatctacatgtttattgaatt

SEQ ID NO: 79 - RNA, 2993 nt, Homo sapiens
  source 1..2993: mol_type = other RNA
ggattgaggggttgactgagcgttgcgagccttagctttctcccgaacgccagcgctgaggacacgatgtcgcggctctcccgctcactgctttgggccgccacctgcctgggcgtgctctgcgtgctgtccgcggacaagaacacgacccagcacccgaacgtgacgactttagcgcccatctccaacgtaacctcggcgccggtgacgtccctcccgctggtcaccactccggcaccagaaacctgtgaaggtcgaaacagctgcgtttcctgttttaatgttagcgttgttaatactacctgcttttggatagaatgtaaagatgagagctattgttcacataactcaacagttagtgattgtcaagtggggaacacgacagacttctgttccgtttccacggccactccagtgccaacagccaattctacagctaaacccacagttcagccctccccttctacaacttccaagacagttactacatcaggtacaacaaataacactgtgactccaacctcacaacctgtgcgaaagtctacctttgatgcagccagtttcattggaggaattgtcctggtcttgggtgtgcaggctgtaattttctttctttataaattctgcaaatctaaagaacgaaattaccacactctgtaaacagacccattgaattaataaggactggtgattcatttgtgtaactcactgaagccaaaatactatcttttaagatgtcccacatggaagacgctattccaggatctttaaatttccatggatgcatataggatgtttgggagcatcatccgtgaagaaaaaatcaattaaatcattgtgttcaacaggaatatttaaaatattctgcatgaatcctgtggctgtcttattttaaatagctgctgctgtgggattatattttttttccttaacatgccaaatataactttctgaaagtgatggaaaatgttgtcttgtgcagacaacatcatggctcttggcagtttaaatttagtaattttaatttagtgaacagaattgagaagaacgtgccaaatgagaatcaattaggtggatttttggctgtcatttcaaaagtggaataaatttattaatttagtagtactaaatggtatccttagattaaaattttgtgcttgataacagctgttttttctacattagaaataagatgccacacaaggaactacattccagatttaaagaaatgaaaggataccattagtgtgtataacagattattgttcatacttgtaaagcatcttatgtcattgagaatataaagaacagtgccttagaagacagtgaaaggtaagctctagcttaatgtctatgatttgttctttgacattaaggaaggtaaggattggtcagaggatgtaacttgatgtgagcagtagtaaacctgttttagatatcatactgttaatattttattgaaaatttatttcagagcggagaaacttaagctaaagtctgttatacagaattgaaagccttcgtatcttgaacctcccaacatttttcttatggctgttgaaaagtatagagctaaattgatttaattacactttcctttgtactttaaaaaaaagtatgctagcactattgtaccttgaaaggatttccaccagactgtcttgagtagtgacttctttggtgaggcaagaaggatatacattattttagaatcatttactatttaaatgagacaatcatattattttagaatcatttattttaaatgagacaatcattttaagttttaagataacagaagtgaccaatgtaatttcacaacacctaaggattttttggttgatcaggttactgtagatttttactgattgtcctggatgaatagactgtgctttttctttttctctcccttccttcttggtttcccatagtataataagcatgcatactttaacttctatagttttctcctttagagggtcgtcttcagttttagaggtttacttctcccttgcctttgactcattggactagtgcagaggctttaagtagtttaaaatgggcttttgcttttctaggtcattaacgttttttatttagtttctttagccaatagtggctgagtttcgcacttgattttcaatattttatagtaagaaatgacaaactgctttgtttcatttcataaacaaactctgcatttagataactattaaaggttgttaagatgaagatttactgtttctttgttactcgttggtacagctgtttgttttacttgcacatttgtacatatacttaatgttttcaagtgccttaattgtttaaaatctctggcttcaaagtttcttggggaaaggtcggtttacctcacattttttgtttccattagtaatattctaggtacctcacaaaatgtattatggtgccatggctgttagtttttagtgagtgctgtaggattaattcgaaaataggcagaattccattcctcccaaggtggcaaaaattagctatactgatgtaattgtcatttacctgggtatgaattccctgacacacattcatgtcaacatatgtagcaaattttgtgaaaacataacaatttgaagcttctgtaattttgagcactgctctaacaacaagcataatataaaattagttagattttgcaagtctacaaatgagctcttgcaacagaactcacagcctttttacttttttcccctaactttagcaatgtagtatcttgagccattaatttttgggtttttttaaaatccagaaggtatatagaaaccttttcagatttttcatctgatttgttcttgcagatgttcttctatcaaataccttattttaccttacagatatttgttgcacaggcagatactgctgtatttagacatttctatttcagttcattaaaaactgcaaaaccaatctgtatcatgtaccaaactgacttaaaataaatctacatgtttattgaa

SEQ ID NO: 80 - RNA, 1402 nt, Homo sapiens
  source 1..1402: mol_type = other RNA
gttcgtgtctcagacttgagtctgagaaggtcgcttgagatttaattacattggttttgcagataggaatagaatgtagctgacgtttgagcacgtagttagtgaaaacttcacacttcaaagtatgcgaaaaggaagaaaagtacccatgtatgtaccgggtgttttgcgtacgtatcctaaggctaaactggaagaaacctgtgaaggtcgaaacagctgcgtttcctgttttaatgttagcgttgttaatactacctgcttttggatagaatgtaaagatgagagctattgttcacataactcaacagttagtgattgtcaagtggggaacacgacagacttctgttccgtttccacggccactccagtgccaacagccaattctacagctaaacccacagttcagccctccccttctacaacttccaagacagttactacatcaggtacaacaaataacactgtgactccaacctcacaacctgtgcgaaagtctacctttgatgcagccagtttcattggaggaattgtcctggtcttgggtgtgcaggctgtaattttctttctttataaattctgcaaatctaaagaacgaaattaccacactctgtaaacagacccattgaattaataaggactggtgattcatttgtgtaactcactgaagccaaaatactatcttttaagatgtcccacatggaagacgctattccaggatctttaaatttccatggatgcatataggatgtttgggagcatcatccgtgaagaaaaaatcaattaaatcattgtgttcaacaggaatatttaaaatattctgcatgaatcctgtggctgtcttattttaaatagctgctgctgtgggattatattttttttccttaacatgccaaatataactttctgaaagtgatggaaaatgttgtcttgtgcagacaacatcatggctcttggcagtttaaatttagtaattttaatttagtgaacagaattgagaagaacgtgccaaatgagaatcaattaggtggatttttggctgtcatttcaaaagtggaataaatttattaatttagtagtactaaatggtatccttagattaaaattttgtgcttgataacagctgttttttctacattagaaataagatgccacacaaggaactacattccagatttaaagaaatgaaaggataccattagtgtgtataacagattattgttcatacttgtaaagcatcttatgtcattgagaatataaagaacagtgccttagaagacagtgaaaggtaagctctagcttaatgtctatgatttgttctttgacattaaggaaggtaaggattggtcagaggatgtaacttgatgtgagcagtagtaaacctgttttagatatcatactg

SEQ ID NO: 81 - DNA, 2992 bp, Homo sapiens
  source 1..2992: mol_type = genomic DNA
ggaagtccgggaaagagaaacttaaagacggtaatgctcgttcgtgtctcagacttgagtctgagaaggtcgcttgagatttaattacattggttttgcagataggaatagaatgtagctgacgtttgagcacgtagttagtgaaaacttcacacttcaaagtatgcgaaaaggaagaaaagtacccatgtatgtaccgggtgttttgcgtacgtatcctaaggctaaactggaagaaacctgtgaaggtcgaaacagctgcgtttcctgttttaatgttagcgttgttaatactacctgcttttggatagaatgtaaagatgagagctattgttcacataactcaacagttagtgattgtcaagtggggaacacgacagacttctgttccgtttccacggccactccagtgccaacagccaattctacagctaaacccacagttcagccctccccttctacaacttccaagacagttactacatcaggtacaacaaataacactgtgactccaacctcacaacctgtgcgaaagtctacctttgatgcagccagtttcattggaggaattgtcctggtcttgggtgtgcaggctgtaattttctttctttataaattctgcaaatctaaagaacgaaattaccacactctgtaaacagacccattgaattaataaggactggtgattcatttgtgtaactcactgaagccaaaatactatcttttaagatgtcccacatggaagacgctattccaggatctttaaatttccatggatgcatataggatgtttgggagcatcatccgtgaagaaaaaatcaattaaatcattgtgttcaacaggaatatttaaaatattctgcatgaatcctgtggctgtcttattttaaatagctgctgctgtgggattatattttttttccttaacatgccaaatataactttctgaaagtgatggaaaatgttgtcttgtgcagacaacatcatggctcttggcagtttaaatttagtaattttaatttagtgaacagaattgagaagaacgtgccaaatgagaatcaattaggtggatttttggctgtcatttcaaaagtggaataaatttattaatttagtagtactaaatggtatccttagattaaaattttgtgcttgataacagctgttttttctacattagaaataagatgccacacaaggaactacattccagatttaaagaaatgaaaggataccattagtgtgtataacagattattgttcatacttgtaaagcatcttatgtcattgagaatataaagaacagtgccttagaagacagtgaaaggtaagctctagcttaatgtctatgatttgttctttgacattaaggaaggtaaggattggtcagaggatgtaacttgatgtgagcagtagtaaacctgttttagatatcatactgttaatattttattgaaaatttatttcagagcggagaaacttaagctaaagtctgttatacagaattgaaagccttcgtatcttgaacctcccaacatttttcttatggctgttgaaaagtatagagctaaattgatttaattacactttcctttgtactttaaaaaaaagtatgctagcactattgtaccttgaaaggatttccaccagactgtcttgagtagtgacttctttggtgaggcaagaaggatatacattattttagaatcatttactatttaaatgagacaatcatattattttagaatcatttattttaaatgagacaatcattttaagttttaagataacagaagtgaccaatgtaatttcacaacacctaaggattttttggttgatcaggttactgtagatttttactgattgtcctggatgaatagactgtgctttttctttttctctcccttccttcttggtttcccatagtataataagcatgcatactttaacttctatagttttctcctttagagggtcgtcttcagttttagaggtttacttctcccttgcctttgactcattggactagtgcagaggctttaagtagtttaaaatgggcttttgcttttctaggtcattaacgttttttatttagtttctttagccaatagtggctgagtttcgcacttgattttcaatattttatagtaagaaatgacaaactgctttgtttcatttcataaacaaactctgcatttagataactattaaaggttgttaagatgaagatttactgtttctttgttactcgttggtacagctgtttgttttacttgcacatttgtacatatacttaatgttttcaagtgccttaattgtttaaaatctctggcttcaaagtttcttggggaaaggtcggtttacctcacattttttgtttccattagtaatattctaggtacctcacaaaatgtattatggtgccatggctgttagtttttagtgagtgctgtaggattaattcgaaaataggcagaattccattcctcccaaggtggcaaaaattagctatactgatgtaattgtcatttacctgggtatgaattccctgacacacattcatgtcaacatatgtagcaaattttgtgaaaacataacaatttgaagcttctgtaattttgagcactgctctaacaacaagcataatataaaattagttagattttgcaagtctacaaatgagctcttgcaacagaactcacagcctttttacttttttcccctaactttagcaatgtagtatcttgagccattaatttttgggtttttttaaaatccagaaggtatatagaaaccttttcagatttttcatctgatttgttcttgcagatgttcttctatcaaataccttattttaccttacagatatttgttgcacaggcagatactgctgtatttagacatttctatttcagttcattaaaaactgcaaaaccaatctgtatcatgtaccaaactgacttaaaataaatctacatgtttattgaattaa

SEQ ID NO: 82 - DNA, 2414 bp, Homo sapiens
  source 1..2414: mol_type = genomic DNA
gcggcgccgcaggggattgaggggttgactgagcgttgcgagccttagctttctcccgaacgccagcgctgaggacacgatgtcgcggctctcccgctcactgctttgggccgccacctgcctgggcgtgctctgcgtgctgtccgcggacaagaacacgacccagcacccgaacgtgacgactttagcgcccatctccaacgtaacctcggcgccggtgacgtccctcccgctggtcaccactccggcaccagaaacctgtgaaggtcgaaacagctgcgtttcctgttttaatgttagcgttgttaatactacctgcttttggatagaatgtaaagatgagagctattgttcacataactcaacagttagtgattgtcaagtggggaacacgacagacttctgttccgtttccacggccactccagtgccaacagccaattctacagctaaacccacagttcagccctccccttctacaacttccaagacagttactacatcaggtacaacaaataacactgtgactccaacctcacaacctgtgcgaaagtctacctttgatgcagccagtttcattggaggaattgtcctggtcttggaaataagatgccacacaaggaactacattccagatttaaagaaatgaaaggataccattagtgtgtataacagattattgttcatacttgtaaagcatcttatgtcattgagaatataaagaacagtgccttagaagacagtgaaaggtaagctctagcttaatgtctatgatttgttctttgacattaaggaaggtaaggattggtcagaggatgtaacttgatgtgagcagtagtaaacctgttttagatatcatactgttaatattttattgaaaatttatttcagagcggagaaacttaagctaaagtctgttatacagaattgaaagccttcgtatcttgaacctcccaacatttttcttatggctgttgaaaagtatagagctaaattgatttaattacactttcctttgtactttaaaaaaaagtatgctagcactattgtaccttgaaaggatttccaccagactgtcttgagtagtgacttctttggtgaggcaagaaggatatacattattttagaatcatttactatttaaatgagacaatcatattattttagaatcatttattttaaatgagacaatcattttaagttttaagataacagaagtgaccaatgtaatttcacaacacctaaggattttttggttgatcaggttactgtagatttttactgattgtcctggatgaatagactgtgctttttctttttctctcccttccttcttggtttcccatagtataataagcatgcatactttaacttctatagttttctcctttagagggtcgtcttcagttttagaggtttacttctcccttgcctttgactcattggactagtgcagaggctttaagtagtttaaaatgggcttttgcttttctaggtcattaacgttttttatttagtttctttagccaatagtggctgagtttcgcacttgattttcaatattttatagtaagaaatgacaaactgctttgtttcatttcataaacaaactctgcatttagataactattaaaggttgttaagatgaagatttactgtttctttgttactcgttggtacagctgtttgttttacttgcacatttgtacatatacttaatgttttcaagtgccttaattgtttaaaatctctggcttcaaagtttcttggggaaaggtcggtttacctcacattttttgtttccattagtaatattctaggtacctcacaaaatgtattatggtgccatggctgttagtttttagtgagtgctgtaggattaattcgaaaataggcagaattccattcctcccaaggtggcaaaaattagctatactgatgtaattgtcatttacctgggtatgaattccctgacacacattcatgtcaacatatgtagcaaattttgtgaaaacataacaatttgaagcttctgtaattttgagcactgctctaacaacaagcataatataaaattagttagattttgcaagtctacaaatgagctcttgcaacagaactcacagcctttttacttttttcccctaactttagcaatgtagtatcttgagccattaatttttgggtttttttaaaatccagaaggtatatagaaaccttttcagatttttcatctgatttgttcttgcagatgttcttctatcaaataccttattttaccttacagatatttgttgcacaggcagatactgctgtatttagacatttctatttcagttcattaaaaactgcaaaaccaatctgtatcatgtaccaaactgacttaaaataaatctacatgtttattgaattaa

SEQ ID NO: 83 - DNA, 3020 bp, Homo sapiens
  source 1..3020: mol_type = genomic DNA
agtctcggaggcggcgccgcaggggattgaggggttgactgagcgttgcgagccttagctttctcccgaacgccagcgctgaggacacgatgtcgcggctctcccgctcactgctttgggccgccacctgcctgggcgtgctctgcgtgctgtccgcggacaagaacacgacccagcacccgaacgtgacgactttagcgcccatctccaacgtaacctcggcgccggtgacgtccctcccgctggtcaccactccggcaccagaaacctgtgaaggtcgaaacagctgcgtttcctgttttaatgttagcgttgttaatactacctgcttttggatagaatgtaaagatgagagctattgttcacataactcaacagttagtgattgtcaagtggggaacacgacagacttctgttccgtttccacggccactccagtgccaacagccaattctacagctaaacccacagttcagccctccccttctacaacttccaagacagttactacatcaggtacaacaaataacactgtgactccaacctcacaacctgtgcgaaagtctacctttgatgcagccagtttcattggaggaattgtcctggtcttgggtgtgcaggctgtaattttctttctttataaattctgcaaatctaaagaacgaaattaccacactctgtaaacagacccattgaattaataaggactggtgattcatttgtgtaactcactgaagccaaaatactatcttttaagatgtcccacatggaagacgctattccaggatctttaaatttccatggatgcatataggatgtttgggagcatcatccgtgaagaaaaaatcaattaaatcattgtgttcaacaggaatatttaaaatattctgcatgaatcctgtggctgtcttattttaaatagctgctgctgtgggattatattttttttccttaacatgccaaatataactttctgaaagtgatggaaaatgttgtcttgtgcagacaacatcatggctcttggcagtttaaatttagtaattttaatttagtgaacagaattgagaagaacgtgccaaatgagaatcaattaggtggatttttggctgtcatttcaaaagtggaataaatttattaatttagtagtactaaatggtatccttagattaaaattttgtgcttgataacagctgttttttctacattagaaataagatgccacacaaggaactacattccagatttaaagaaatgaaaggataccattagtgtgtataacagattattgttcatacttgtaaagcatcttatgtcattgagaatataaagaacagtgccttagaagacagtgaaaggtaagctctagcttaatgtctatgatttgttctttgacattaaggaaggtaaggattggtcagaggatgtaacttgatgtgagcagtagtaaacctgttttagatatcatactgttaatattttattgaaaatttatttcagagcggagaaacttaagctaaagtctgttatacagaattgaaagccttcgtatcttgaacctcccaacatttttcttatggctgttgaaaagtatagagctaaattgatttaattacactttcctttgtactttaaaaaaaagtatgctagcactattgtaccttgaaaggatttccaccagactgtcttgagtagtgacttctttggtgaggcaagaaggatatacattattttagaatcatttactatttaaatgagacaatcatattattttagaatcatttattttaaatgagacaatcattttaagttttaagataacagaagtgaccaatgtaatttcacaacacctaaggattttttggttgatcaggttactgtagatttttactgattgtcctggatgaatagactgtgctttttctttttctctcccttccttcttggtttcccatagtataataagcatgcatactttaacttctatagttttctcctttagagggtcgtcttcagttttagaggtttacttctcccttgcctttgactcattggactagtgcagaggctttaagtagtttaaaatgggcttttgcttttctaggtcattaacgttttttatttagtttctttagccaatagtggctgagtttcgcacttgattttcaatattttatagtaagaaatgacaaactgctttgtttcatttcataaacaaactctgcatttagataactattaaaggttgttaagatgaagatttactgtttctttgttactcgttggtacagctgtttgttttacttgcacatttgtacatatacttaatgttttcaagtgccttaattgtttaaaatctctggcttcaaagtttcttggggaaaggtcggtttacctcacattttttgtttccattagtaatattctaggtacctcacaaaatgtattatggtgccatggctgttagtttttagtgagtgctgtaggattaattcgaaaataggcagaattccattcctcccaaggtggcaaaaattagctatactgatgtaattgtcatttacctgggtatgaattccctgacacacattcatgtcaacatatgtagcaaattttgtgaaaacataacaatttgaagcttctgtaattttgagcactgctctaacaacaagcataatataaaattagttagattttgcaagtctacaaatgagctcttgcaacagaactcacagcctttttacttttttcccctaactttagcaatgtagtatcttgagccattaatttttgggtttttttaaaatccagaaggtatatagaaaccttttcagatttttcatctgatttgttcttgcagatgttcttctatcaaataccttattttaccttacagatatttgttgcacaggcagatactgctgtatttagacatttctatttcagttcattaaaaactgcaaaaccaatctgtatcatgtaccaaactgacttaaaataaatctacatgtttattgaattaa

SEQ ID NO: 84 - DNA, 2954 bp, Homo sapiens
  source 1..2954: mol_type = genomic DNA
ggattgaggggttgactgagcgttgcgagccttagctttctcccgaacgccagcgctgaggacacgatgtcgcggctctcccgctcactgctttgggccgccacctgcctgggcgtgctctgcgtgctgtccgcggacaagaacacgacccagcacccgaacgtgacgactttagcgcccatctccaacgtaacctcggcgccggtgacgtccctcccgctggtcaccactccggcaccagaaacctgtgaaggtcgaaacagctgcgtttcctgttttaatgttagcgttgttaatactacctgcttttggatagaatgtaaagatgagagctattgttcacataactcaacagttagtgattgtcaagtggggaacacgacagacttctgttccgctaaacccacagttcagccctccccttctacaacttccaagacagttactacatcaggtacaacaaataacactgtgactccaacctcacaacctgtgcgaaagtctacctttgatgcagccagtttcattggaggaattgtcctggtcttgggtgtgcaggctgtaattttctttctttataaattctgcaaatctaaagaacgaaattaccacactctgtaaacagacccattgaattaataaggactggtgattcatttgtgtaactcactgaagccaaaatactatcttttaagatgtcccacatggaagacgctattccaggatctttaaatttccatggatgcatataggatgtttgggagcatcatccgtgaagaaaaaatcaattaaatcattgtgttcaacaggaatatttaaaatattctgcatgaatcctgtggctgtcttattttaaatagctgctgctgtgggattatattttttttccttaacatgccaaatataactttctgaaagtgatggaaaatgttgtcttgtgcagacaacatcatggctcttggcagtttaaatttagtaattttaatttagtgaacagaattgagaagaacgtgccaaatgagaatcaattaggtggatttttggctgtcatttcaaaagtggaataaatttattaatttagtagtactaaatggtatccttagattaaaattttgtgcttgataacagctgttttttctacattagaaataagatgccacacaaggaactacattccagatttaaagaaatgaaaggataccattagtgtgtataacagattattgttcatacttgtaaagcatcttatgtcattgagaatataaagaacagtgccttagaagacagtgaaaggtaagctctagcttaatgtctatgatttgttctttgacattaaggaaggtaaggattggtcagaggatgtaacttgatgtgagcagtagtaaacctgttttagatatcatactgttaatattttattgaaaatttatttcagagcggagaaacttaagctaaagtctgttatacagaattgaaagccttcgtatcttgaacctcccaacatttttcttatggctgttgaaaagtatagagctaaattgatttaattacactttcctttgtactttaaaaaaaagtatgctagcactattgtaccttgaaaggatttccaccagactgtcttgagtagtgacttctttggtgaggcaagaaggatatacattattttagaatcatttactatttaaatgagacaatcatattattttagaatcatttattttaaatgagacaatcattttaagttttaagataacagaagtgaccaatgtaatttcacaacacctaaggattttttggttgatcaggttactgtagatttttactgattgtcctggatgaatagactgtgctttttctttttctctcccttccttcttggtttcccatagtataataagcatgcatactttaacttctatagttttctcctttagagggtcgtcttcagttttagaggtttacttctcccttgcctttgactcattggactagtgcagaggctttaagtagtttaaaatgggcttttgcttttctaggtcattaacgttttttatttagtttctttagccaatagtggctgagtttcgcacttgattttcaatattttatagtaagaaatgacaaactgctttgtttcatttcataaacaaactctgcatttagataactattaaaggttgttaagatgaagatttactgtttctttgttactcgttggtacagctgtttgttttacttgcacatttgtacatatacttaatgttttcaagtgccttaattgtttaaaatctctggcttcaaagtttcttggggaaaggtcggtttacctcacattttttgtttccattagtaatattctaggtacctcacaaaatgtattatggtgccatggctgttagtttttagtgagtgctgtaggattaattcgaaaataggcagaattccattcctcccaaggtggcaaaaattagctatactgatgtaattgtcatttacctgggtatgaattccctgacacacattcatgtcaacatatgtagcaaattttgtgaaaacataacaatttgaagcttctgtaattttgagcactgctctaacaacaagcataatataaaattagttagattttgcaagtctacaaatgagctcttgcaacagaactcacagcctttttacttttttcccctaactttagcaatgtagtatcttgagccattaatttttgggtttttttaaaatccagaaggtatatagaaaccttttcagatttttcatctgatttgttcttgcagatgttcttctatcaaataccttattttaccttacagatatttgttgcacaggcagatactgctgtatttagacatttctatttcagttcattaaaaactgcaaaaccaatctgtatcatgtaccaaactgacttaaaataaatctacatgtttattgaa

SEQ ID NO: 85 - DNA, 2936 bp, Homo sapiens
  source 1..2936: mol_type = genomic DNA
ggattgaggggttgactgagcgttgcgagccttagctttctcccgaacgccagcgctgaggacacgatgtcgcggctctcccgctcactgctttgggccgccacctgcctgggcgtgctctgcgtgctgtccgcggacaagaacacgacccagcacccgaacgtgacgactttagcgcccatctccaacgtaacctcggcgccggtgacgtccctcccgctggtcaccactccggcaccagaaacctgtgaaggtcgaaacagctgcgtttcctgttttaatgttagcgttgttaatactacctgcttttggatagaatgtaaagatgagagctattgttcacataactcaacagttagtgattgtcaagtggggaacacgacagacttctgttccgtttccacggccactccagtgccaacagccaattctacaggtacaacaaataacactgtgactccaacctcacaacctgtgcgaaagtctacctttgatgcagccagtttcattggaggaattgtcctggtcttgggtgtgcaggctgtaattttctttctttataaattctgcaaatctaaagaacgaaattaccacactctgtaaacagacccattgaattaataaggactggtgattcatttgtgtaactcactgaagccaaaatactatcttttaagatgtcccacatggaagacgctattccaggatctttaaatttccatggatgcatataggatgtttgggagcatcatccgtgaagaaaaaatcaattaaatcattgtgttcaacaggaatatttaaaatattctgcatgaatcctgtggctgtcttattttaaatagctgctgctgtgggattatattttttttccttaacatgccaaatataactttctgaaagtgatggaaaatgttgtcttgtgcagacaacatcatggctcttggcagtttaaatttagtaattttaatttagtgaacagaattgagaagaacgtgccaaatgagaatcaattaggtggatttttggctgtcatttcaaaagtggaataaatttattaatttagtagtactaaatggtatccttagattaaaattttgtgcttgataacagctgttttttctacattagaaataagatgccacacaaggaactacattccagatttaaagaaatgaaaggataccattagtgtgtataacagattattgttcatacttgtaaagcatcttatgtcattgagaatataaagaacagtgccttagaagacagtgaaaggtaagctctagcttaatgtctatgatttgttctttgacattaaggaaggtaaggattggtcagaggatgtaacttgatgtgagcagtagtaaacctgttttagatatcatactgttaatattttattgaaaatttatttcagagcggagaaacttaagctaaagtctgttatacagaattgaaagccttcgtatcttgaacctcccaacatttttcttatggctgttgaaaagtatagagctaaattgatttaattacactttcctttgtactttaaaaaaaagtatgctagcactattgtaccttgaaaggatttccaccagactgtcttgagtagtgacttctttggtgaggcaagaaggatatacattattttagaatcatttactatttaaatgagacaatcatattattttagaatcatttattttaaatgagacaatcattttaagttttaagataacagaagtgaccaatgtaatttcacaacacctaaggattttttggttgatcaggttactgtagatttttactgattgtcctggatgaatagactgtgctttttctttttctctcccttccttcttggtttcccatagtataataagcatgcatactttaacttctatagttttctcctttagagggtcgtcttcagttttagaggtttacttctcccttgcctttgactcattggactagtgcagaggctttaagtagtttaaaatgggcttttgcttttctaggtcattaacgttttttatttagtttctttagccaatagtggctgagtttcgcacttgattttcaatattttatagtaagaaatgacaaactgctttgtttcatttcataaacaaactctgcatttagataactattaaaggttgttaagatgaagatttactgtttctttgttactcgttggtacagctgtttgttttacttgcacatttgtacatatacttaatgttttcaagtgccttaattgtttaaaatctctggcttcaaagtttcttggggaaaggtcggtttacctcacattttttgtttccattagtaatattctaggtacctcacaaaatgtattatggtgccatggctgttagtttttagtgagtgctgtaggattaattcgaaaataggcagaattccattcctcccaaggtggcaaaaattagctatactgatgtaattgtcatttacctgggtatgaattccctgacacacattcatgtcaacatatgtagcaaattttgtgaaaacataacaatttgaagcttctgtaattttgagcactgctctaacaacaagcataatataaaattagttagattttgcaagtctacaaatgagctcttgcaacagaactcacagcctttttacttttttcccctaactttagcaatgtagtatcttgagccattaatttttgggtttttttaaaatccagaaggtatatagaaaccttttcagatttttcatctgatttgttcttgcagatgttcttctatcaaataccttattttaccttacagatatttgttgcacaggcagatactgctgtatttagacatttctatttcagttcattaaaaactgcaaaaccaatctgtatcatgtaccaaactgacttaaaataaatctacatgtttattgaa

SEQ ID NO: 86 - DNA, 964 bp, Homo sapiens
  source 1..964: mol_type = genomic DNA
gctttctcccgaacgccagcgctgaggacacgatgtcgcggctctcccgctcactgctttgggccgccacctgcctgggcgtgctctgcgtgctgtccgcggacaagaacacgacccagcacccgaacgtgacgactttagcgcccatctccaacgtaacctcggcgccggtgacgtccctcccgctggtcaccactccggcaccagaaacctgtgaaggtcgaaacagctgcgtttcctgttttaatgttagcgttgttaatactacctgcttttggatagaatgtaaagatgagagctattgttcacataactcaacagttagtgattgtcaagtggggaacacgacagacttctgttccgtttccacggccactccagtgccaacagccaattctacagctaaacccacagttcagccctccccttctacaacttccaagacagttactacatcagaaataagatgccacacaaggaactacattccagatttaaagaaatgaaaggataccattagtgtgtataacagattattgttcatacttgtaaagcatcttatgtcattgagaatataaagaacagtgccttagaagacagtgaaaggtaagctctagcttaatgtctatgatttgttctttgacattaaggaaggtaaggattggtcagaggatgtaacttgatgtgagcagtagtaaacctgttttagatatcatactgttaatattttattgaaaatttatttcagagcggagaaacttaagctaaagtctgttatacagaattgaaagccttcgtatcttgaacctcccaacatttttcttatggctgttgaaaagtatagagctaaattgatttaattacactttcctttgtactttaaaaaaaagtatgctagcactattgtaccttgaaaggatttccaccagactgtcttgagtagtgacttctttggtgaggcaag

SEQ ID NO: 87 - DNA, 2424 bp, Homo sapiens
  source 1..2424: mol_type = genomic DNA
agtctcggaggcggcgccgcaggggattgaggggttgactgagcgttgcgagccttagctttctcccgaacgccagcgctgaggacacgatgtcgcggctctcccgctcactgctttgggccgccacctgcctgggcgtgctctgcgtgctgtccgcggacaagaacacgacccagcacccgaacgtgacgactttagcgcccatctccaacgtaacctcggcgccggtgacgtccctcccgctggtcaccactccggcaccagaaacctgtgaaggtcgaaacagctgcgtttcctgttttaatgttagcgttgttaatactacctgcttttggatagaatgtaaagatgagagctattgttcacataactcaacagttagtgattgtcaagtggggaacacgacagacttctgttccgtttccacggccactccagtgccaacagccaattctacagctaaacccacagttcagccctccccttctacaacttccaagacagttactacatcaggtacaacaaataacactgtgactccaacctcacaacctgtgcgaaagtctacctttgatgcagccagtttcattggaggaattgtcctggtcttggaaataagatgccacacaaggaactacattccagatttaaagaaatgaaaggataccattagtgtgtataacagattattgttcatacttgtaaagcatcttatgtcattgagaatataaagaacagtgccttagaagacagtgaaaggtaagctctagcttaatgtctatgatttgttctttgacattaaggaaggtaaggattggtcagaggatgtaacttgatgtgagcagtagtaaacctgttttagatatcatactgttaatattttattgaaaatttatttcagagcggagaaacttaagctaaagtctgttatacagaattgaaagccttcgtatcttgaacctcccaacatttttcttatggctgttgaaaagtatagagctaaattgatttaattacactttcctttgtactttaaaaaaaagtatgctagcactattgtaccttgaaaggatttccaccagactgtcttgagtagtgacttctttggtgaggcaagaaggatatacattattttagaatcatttactatttaaatgagacaatcatattattttagaatcatttattttaaatgagacaatcattttaagttttaagataacagaagtgaccaatgtaatttcacaacacctaaggattttttggttgatcaggttactgtagatttttactgattgtcctggatgaatagactgtgctttttctttttctctcccttccttcttggtttcccatagtataataagcatgcatactttaacttctatagttttctcctttagagggtcgtcttcagttttagaggtttacttctcccttgcctttgactcattggactagtgcagaggctttaagtagtttaaaatgggcttttgcttttctaggtcattaacgttttttatttagtttctttagccaatagtggctgagtttcgcacttgattttcaatattttatagtaagaaatgacaaactgctttgtttcatttcataaacaaactctgcatttagataactattaaaggttgttaagatgaagatttactgtttctttgttactcgttggtacagctgtttgttttacttgcacatttgtacatatacttaatgttttcaagtgccttaattgtttaaaatctctggcttcaaagtttcttggggaaaggtcggtttacctcacattttttgtttccattagtaatattctaggtacctcacaaaatgtattatggtgccatggctgttagtttttagtgagtgctgtaggattaattcgaaaataggcagaattccattcctcccaaggtggcaaaaattagctatactgatgtaattgtcatttacctgggtatgaattccctgacacacattcatgtcaacatatgtagcaaattttgtgaaaacataacaatttgaagcttctgtaattttgagcactgctctaacaacaagcataatataaaattagttagattttgcaagtctacaaatgagctcttgcaacagaactcacagcctttttacttttttcccctaactttagcaatgtagtatcttgagccattaatttttgggtttttttaaaatccagaaggtatatagaaaccttttcagatttttcatctgatttgttcttgcagatgttcttctatcaaataccttattttaccttacagatatttgttgcacaggcagatactgctgtatttagacatttctatttcagttcattaaaaactgcaaaaccaatctgtatcatgtaccaaactgacttaaaataaatctacatgtttattgaattaa

SEQ ID NO: 88 - DNA, 2963 bp, Homo sapiens
  source 1..2963: mol_type = genomic DNA
agtctcggaggcggcgccgcaggggattgaggggttgactgagcgttgcgagccttagctttctcccgaacgccagcgctgaggacacgatgtcgcggctctcccgctcactgctttgggccgccacctgcctgggcgtgctctgcgtgctgtccgcggacaagaacacgacccagcacccgaacgtgacgactttagcgcccatctccaacgtaacctcggcgccggtgacgtccctcccgctggtcaccactccggcaccagaaacctgtgaaggtcgaaacagctgcgtttcctgttttaatgttagcgttgttaatactacctgcttttggatagaatgtaaagatgagagctattgttcacataactcaacagttagtgattgtcaagtggggaacacgacagacttctgttccgtttccacggccactccagtgccaacagccaattctacaggtacaacaaataacactgtgactccaacctcacaacctgtgcgaaagtctacctttgatgcagccagtttcattggaggaattgtcctggtcttgggtgtgcaggctgtaattttctttctttataaattctgcaaatctaaagaacgaaattaccacactctgtaaacagacccattgaattaataaggactggtgattcatttgtgtaactcactgaagccaaaatactatcttttaagatgtcccacatggaagacgctattccaggatctttaaatttccatggatgcatataggatgtttgggagcatcatccgtgaagaaaaaatcaattaaatcattgtgttcaacaggaatatttaaaatattctgcatgaatcctgtggctgtcttattttaaatagctgctgctgtgggattatattttttttccttaacatgccaaatataactttctgaaagtgatggaaaatgttgtcttgtgcagacaacatcatggctcttggcagtttaaatttagtaattttaatttagtgaacagaattgagaagaacgtgccaaatgagaatcaattaggtggatttttggctgtcatttcaaaagtggaataaatttattaatttagtagtactaaatggtatccttagattaaaattttgtgcttgataacagctgttttttctacattagaaataagatgccacacaaggaactacattccagatttaaagaaatgaaaggataccattagtgtgtataacagattattgttcatacttgtaaagcatcttatgtcattgagaatataaagaacagtgccttagaagacagtgaaaggtaagctctagcttaatgtctatgatttgttctttgacattaaggaaggtaaggattggtcagaggatgtaacttgatgtgagcagtagtaaacctgttttagatatcatactgttaatattttattgaaaatttatttcagagcggagaaacttaagctaaagtctgttatacagaattgaaagccttcgtatcttgaacctcccaacatttttcttatggctgttgaaaagtatagagctaaattgatttaattacactttcctttgtactttaaaaaaaagtatgctagcactattgtaccttgaaaggatttccaccagactgtcttgagtagtgacttctttggtgaggcaagaaggatatacattattttagaatcatttactatttaaatgagacaatcatattattttagaatcatttattttaaatgagacaatcattttaagttttaagataacagaagtgaccaatgtaatttcacaacacctaaggattttttggttgatcaggttactgtagatttttactgattgtcctggatgaatagactgtgctttttctttttctctcccttccttcttggtttcccatagtataataagcatgcatactttaacttctatagttttctcctttagagggtcgtcttcagttttagaggtttacttctcccttgcctttgactcattggactagtgcagaggctttaagtagtttaaaatgggcttttgcttttctaggtcattaacgttttttatttagtttctttagccaatagtggctgagtttcgcacttgattttcaatattttatagtaagaaatgacaaactgctttgtttcatttcataaacaaactctgcatttagataactattaaaggttgttaagatgaagatttactgtttctttgttactcgttggtacagctgtttgttttacttgcacatttgtacatatacttaatgttttcaagtgccttaattgtttaaaatctctggcttcaaagtttcttggggaaaggtcggtttacctcacattttttgtttccattagtaatattctaggtacctcacaaaatgtattatggtgccatggctgttagtttttagtgagtgctgtaggattaattcgaaaataggcagaattccattcctcccaaggtggcaaaaattagctatactgatgtaattgtcatttacctgggtatgaattccctgacacacattcatgtcaacatatgtagcaaattttgtgaaaacataacaatttgaagcttctgtaattttgagcactgctctaacaacaagcataatataaaattagttagattttgcaagtctacaaatgagctcttgcaacagaactcacagcctttttacttttttcccctaactttagcaatgtagtatcttgagccattaatttttgggtttttttaaaatccagaaggtatatagaaaccttttcagatttttcatctgatttgttcttgcagatgttcttctatcaaataccttattttaccttacagatatttgttgcacaggcagatactgctgtatttagacatttctatttcagttcattaaaaactgcaaaaccaatctgtatcatgtaccaaactgacttaaaataaatctacatgtttattgaattaa

SEQ ID NO: 89 - DNA, 2981 bp, Homo sapiens
  source 1..2981: mol_type = genomic DNA
agtctcggaggcggcgccgcaggggattgaggggttgactgagcgttgcgagccttagctttctcccgaacgccagcgctgaggacacgatgtcgcggctctcccgctcactgctttgggccgccacctgcctgggcgtgctctgcgtgctgtccgcggacaagaacacgacccagcacccgaacgtgacgactttagcgcccatctccaacgtaacctcggcgccggtgacgtccctcccgctggtcaccactccggcaccagaaacctgtgaaggtcgaaacagctgcgtttcctgttttaatgttagcgttgttaatactacctgcttttggatagaatgtaaagatgagagctattgttcacataactcaacagttagtgattgtcaagtggggaacacgacagacttctgttccgctaaacccacagttcagccctccccttctacaacttccaagacagttactacatcaggtacaacaaataacactgtgactccaacctcacaacctgtgcgaaagtctacctttgatgcagccagtttcattggaggaattgtcctggtcttgggtgtgcaggctgtaattttctttctttataaattctgcaaatctaaagaacgaaattaccacactctgtaaacagacccattgaattaataaggactggtgattcatttgtgtaactcactgaagccaaaatactatcttttaagatgtcccacatggaagacgctattccaggatctttaaatttccatggatgcatataggatgtttgggagcatcatccgtgaagaaaaaatcaattaaatcattgtgttcaacaggaatatttaaaatattctgcatgaatcctgtggctgtcttattttaaatagctgctgctgtgggattatattttttttccttaacatgccaaatataactttctgaaagtgatggaaaatgttgtcttgtgcagacaacatcatggctcttggcagtttaaatttagtaattttaatttagtgaacagaattgagaagaacgtgccaaatgagaatcaattaggtggatttttggctgtcatttcaaaagtggaataaatttattaatttagtagtactaaatggtatccttagattaaaattttgtgcttgataacagctgttttttctacattagaaataagatgccacacaaggaactacattccagatttaaagaaatgaaaggataccattagtgtgtataacagattattgttcatacttgtaaagcatcttatgtcattgagaatataaagaacagtgccttagaagacagtgaaaggtaagctctagcttaatgtctatgatttgttctttgacattaaggaaggtaaggattggtcagaggatgtaacttgatgtgagcagtagtaaacctgttttagatatcatactgttaatattttattgaaaatttatttcagagcggagaaacttaagctaaagtctgttatacagaattgaaagccttcgtatcttgaacctcccaacatttttcttatggctgttgaaaagtatagagctaaattgatttaattacactttcctttgtactttaaaaaaaagtatgctagcactattgtaccttgaaaggatttccaccagactgtcttgagtagtgacttctttggtgaggcaagaaggatatacattattttagaatcatttactatttaaatgagacaatcatattattttagaatcatttattttaaatgagacaatcattttaagttttaagataacagaagtgaccaatgtaatttcacaacacctaaggattttttggttgatcaggttactgtagatttttactgattgtcctggatgaatagactgtgctttttctttttctctcccttccttcttggtttcccatagtataataagcatgcatactttaacttctatagttttctcctttagagggtcgtcttcagttttagaggtttacttctcccttgcctttgactcattggactagtgcagaggctttaagtagtttaaaatgggcttttgcttttctaggtcattaacgttttttatttagtttctttagccaatagtggctgagtttcgcacttgattttcaatattttatagtaagaaatgacaaactgctttgtttcatttcataaacaaactctgcatttagataactattaaaggttgttaagatgaagatttactgtttctttgttactcgttggtacagctgtttgttttacttgcacatttgtacatatacttaatgttttcaagtgccttaattgtttaaaatctctggcttcaaagtttcttggggaaaggtcggtttacctcacattttttgtttccattagtaatattctaggtacctcacaaaatgtattatggtgccatggctgttagtttttagtgagtgctgtaggattaattcgaaaataggcagaattccattcctcccaaggtggcaaaaattagctatactgatgtaattgtcatttacctgggtatgaattccctgacacacattcatgtcaacatatgtagcaaattttgtgaaaacataacaatttgaagcttctgtaattttgagcactgctctaacaacaagcataatataaaattagttagattttgcaagtctacaaatgagctcttgcaacagaactcacagcctttttacttttttcccctaactttagcaatgtagtatcttgagccattaatttttgggtttttttaaaatccagaaggtatatagaaaccttttcagatttttcatctgatttgttcttgcagatgttcttctatcaaataccttattttaccttacagatatttgttgcacaggcagatactgctgtatttagacatttctatttcagttcattaaaaactgcaaaaccaatctgtatcatgtaccaaactgacttaaaataaatctacatgtttattgaattaa

SEQ ID NO: 90 - DNA, 2427 bp, Homo sapiens
  source 1..2427: mol_type = genomic DNA
gcggcgccgcaggggattgaggggttgactgagcgttgcgagccttagctttctcccgaacgccagcgctgaggacacgatgtcgcggctctcccgctcactgctttgggccgccacctgcctgggcgtgctctgcgtgctgtccgcggacaagaacacgacccagcacccgaacgtgacgactttagcgcccatctccaacgtaacctcggcgccggtgacgtccctcccgctggtcaccactccggcaccagaaacctgtgaaggtcgaaacagctgcgtttcctgttttaatgttagcgttgttaatactacctgcttttggatagaatgtaaagatgagagctattgttcacataactcaacagttagtgattgtcaagtggggaacacgacagacttctgttccgtttccacggccactccagtgccaacagccaattctacagctaaacccacagttcagccctccccttctacaacttccaagacagttactacatcaggtacaacaaataacactgtgactccaacctcacaacctgtgcgaaagtctacctttgatgcagccagtttcattggaggaattgtcctggtcttggaaataagatgccacacaaggaactacattccagatttaaagaaatgaaaggataccattagtgtgtataacagattattgttcatacttgtaaagcaccttatgtcattgagaatataaagaacagtgccttagaagacagtgaaaggtaagctctagcttaatgtctatgatttgttctttgacattaaggaaggtaaggattggtcagaggatgtaacttgatgtgagcagtagtaaacctgttttagatatcatactgttaatattttattgaaaatttatttcagagcggagaaacttaagctaaagtctgttatacagaattgaaagccttcgtatcttgaacctcccaacatttttcttatggctgttgaaaagtatagagctaaattgatttaattacactttcctttgtactttaaaaaaaagtatgctagcactattgtaccttgaaaggatttccaccagactgtcttgagtagtgacttctttggtgaggcaagaaggatatacattattttagaatcatttactatttaaatgagacaatcatattattttagaatcatttattttaaatgagacaatcattttaagttttaagataacagaagtgaccaatgtaatttcacaacacctaaggattttttggttgatcaggttactgtagatttttactgattgtcctggatgaatagactgtgctttttctttttctctcccttccttcttggtttcccatagtataataagcatgcatactttaacttctatagttttctcctttagagggtcttcttcagttttagaggtttacttctcccttgcctttgactcattggactagtgcagaggctttaagtagtttaaaatgggcttttgcttttctaggtcattaacgttttttatttagtttctttagccaatagtggctgagtttcgcacttgattttcaatattttatagtaagaaatgacaaactgctttggttcatttcataaacaaactctgcatttagataactattaaaggttgttaagatgaagatttactgtttctttgttactcgttggtacagctgtttgttttacttgcacatttgtagatatacttaatgttttcaagtgccttaattgtttaaaatctctggcttcaaagtttcttggggaaaggtcggtttacctcacattttttgtttccattagtaatattctaggtacctcacaaaatgtattatggtgccatggctgttagtttttagtgagtgctgtaggattaattcgaaaataggcagaattccattcctcccaaggtggcaaaaattagctatactgatgtaattgtcatttacctgggtatgaattccctgacacacattcatgtcaacatatgtagcaaattttgtgaaaacacaacaatttgaagcttctgtaattttgagcactgctctaacaacaagcataatataaaattagttagattttgcaagtctacaaatgagctcttgcaacagaactcacagcctttttacttttttcccctaactttagcaatgtagtatcttgagccattaatttttgggtttttttaaaatccagaaggtatatagaaaccttttcagatttttcatctgatttgttcttgcagatgttcttctatcaaataccttattttaccttacagatatttgttgcacaggcagatactgctgtatttagacatttctatttcagttcattaaaaactgcaaaaccaatctgtatcatgtaccaaactgacttaaaataaatctacatgtttattgaattaaaacaaaaaaaaaa

SEQ ID NO: 91 - DNA, 2929 bp, Homo sapiens
  source 1..2929: mol_type = genomic DNA
atgtcgcggctctcccgctcactgctttgggccgccacctgcctgggcgtgctctgcgtgctgtccgcggacaagaacacgacccagcacccgaacgtgacgactttagcgcccatctccaacgtaacctcggcgccggtgacgtccctcccgctggtcaccactccggcaccagaaacctgtgaaggtcgaaacagctgcgtttcctgttttaatgttagcgttgttaatactacctgcttttggatagaatgtaaagatgagagctattgttcacataactcaacagttagtgattgtcaagtggggaacacgacagacttctgttccgtttccacggccactccagtgccaacagccaattctacagctaaacccacagttcagccctccccttctacaacttccaagacagttactacatcaggtacaacaaataacactgtgactccaacctcacaacctgtgcgaaagtctacctttgatgcagccagtttcattggaggaattgtcctggtcttgggtgtgcaggctgtaattttctttctttataaattctgcaaatctaaagaacgaaattaccacactctgtaaacagacccattgaattaataaggactggtgattcatttgtgtaactcactgaagccaaaatactatcttttaagatgtcccacatggaagacgctattccaggatctttaaatttccatggatgcatataggatgtttgggagcatcatccgtgaagaaaaaatcaattaaatcattgtgttcaacaggaatatttaaaatattctgcatgaatcctgtggctgtcttattttaaatagctgctgctgtgggattatattttttttccttaacatgccaaatataactttctgaaagtgatggaaaatgttgtcttgtgcagacaacatcatggctcttggcagtttaaatttagtaattttaatttagtgaacagaattgagaagaacgtgccaaatgagaatcaattaggtggatttttggctgtcatttcaaaagtggaataaatttattaatttagtagtactaaatggtatccttagattaaaattttgtgcttgataacagctgttttttctacattagaaataagatgccacacaaggaactacattccagatttaaagaaatgaaaggataccattagtgtgtataacagattattgttcatacttgtaaagcatcttatgtcattgagaatataaagaacagtgccttagaagacagtgaaaggtaagctctagcttaatgtctatgatttgttctttgacattaaggaaggtaaggattggtcagaggatgtaacttgatgtgagcagtagtaaacctgttttagatatcatactgttaatattttattgaaaatttatttcagagcggagaaacttaagctaaagtctgttatacagaattgaaagccttcgtatcttgaacctcccaacatttttcttatggctgttgaaaagtatagagctaaattgatttaattacactttcctttgtactttaaaaaaaagtatgctagcactattgtaccttgaaaggatttccaccagactgtcttgagtagtgacttctttggtgaggcaagaaggatatacattattttagaatcatttactatttaaatgagacaatcatattattttagaatcatttattttaaatgagacaatcattttaagttttaagataacagaagtgaccaatgtaatttcacaacacctaaggattttttggttgatcaggttactgtagatttttactgattgtcctggatgaatagactgtgctttttctttttctctcccttccttcttggtttcccatagtataataagcatgcatactttaacttctatagttttctcctttagagggtcgtcttcagttttagaggtttacttctcccttgcctttgactcattggactagtgcagaggctttaagtagtttaaaatgggcttttgcttttctaggtcattaacgttttttatttagtttctttagccaatagtggctgagtttcgcacttgattttcaatattttatagtaagaaatgacaaactgctttgtttcatttcataaacaaactctgcatttagataactattaaaggttgttaagatgaagatttactgtttctttgttactcgttggtacagctgtttgttttacttgcacatttgtacatatacttaatgttttcaagtgccttaattgtttaaaatctctggcttcaaagtttcttggggaaaggtcggtttacctcacattttttgtttccattagtaatattctaggtacctcacaaaatgtattatggtgccatggctgttagtttttagtgagtgctgtaggattaattcgaaaataggcagaattccattcctcccaaggtggcaaaaattagctatactgatgtaattgtcatttacctgggtatgaattccctgacacacattcatgtcaacatatgtagcaaattttgtgaaaacataacaatttgaagcttctgtaattttgagcactgctctaacaacaagcataatataaaattagttagattttgcaagtctacaaatgagctcttgcaacagaactcacagcctttttacttttttcccctaactttagcaatgtagtatcttgagccattaatttttgggtttttttaaaatccagaaggtatatagaaaccttttcagatttttcatctgatttgttcttgcagatgttcttctatcaaataccttattttaccttacagatatttgttgcacaggcagatactgctgtatttagacatttctatttcagttcattaaaaactgcaaaaccaatctgtatcatgtaccaaactgacttaaaataaatctacatgtttattgaatt

SEQ ID NO: 92 - DNA, 2950 bp, Homo sapiens
  source 1..2950: mol_type = genomic DNA
cggcgccgcaggggattgaggggttgactgagcgttgcgagccttagctttctcccgaacgccagcgctgaggacacgatgtcgcggctctcccgctcactgctttgggccgccacctgcctgggcgtgctctgcgtgctgtccgcggacaagaacacgacccagcacccgaacgtgacgactttagcgcccatctccaacgtaacctcggcgccggtgacgtccctcccgctggtcaccactccggcaccagaaacctgtgaaggtcgaaacagctgcgtttcctgttttaatgttagcgttgttaatactacctgcttttggatagaatgtaaagatgagagctattgttcacataactcaacagttagtgattgtcaagtggggaacacgacagacttctgttccgtttccacggccactccagtgccaacagccaattctacaggtacaacaaataacactgtgactccaacctcacaacctgtgcgaaagtctacctttgatgcagccagtttcattggaggaattgtcctggtcttgggtgtgcaggctgtaattttctttctttataaattctgcaaatctaaagaacgaaattaccacactctgtaaacagacccattgaattaataaggactggtgattcatttgtgtaactcactgaagccaaaatactatcttttaagatgtcccacatggaagacgctattccaggatctttaaatttccatggatgcatataggatgtttgggagcatcatccgtgaagaaaaaatcaattaaatcattgtgttcaacaggaatatttaaaatattctgcatgaatcctgtggctgtcttattttaaatagctgctgctgtgggattatattttttttccttaacatgccaaatataactttctgaaagtgatggaaaatgttgtcttgtgcagacaacatcatggctcttggcagtttaaatttagtaattttaatttagtgaacagaattgagaagaacgtgccaaatgagaatcaattaggtggatttttggctgtcatttcaaaagtggaataaatttattaatttagtagtactaaatggtatccttagattaaaattttgtgcttgataacagctgttttttctacattagaaataagatgccacacaaggaactacattccagatttaaagaaatgaaaggataccattagtgtgtataacagattattgttcatacttgtaaagcatcttatgtcattgagaatataaagaacagtgccttagaagacagtgaaaggtaagctctagcttaatgtctatgatttgttctttgacattaaggaaggtaaggattggtcagaggatgtaacttgatgtgagcagtagtaaacctgttttagatatcatactgttaatattttattgaaaatttatttcagagcggagaaacttaagctaaagtctgttatacagaattgaaagccttcgtatcttgaacctcccaacatttttcttatggctgttgaaaagtatagagctaaattgatttaattacactttcctttgtactttaaaaaaaagtatgctagcactattgtaccttgaaaggatttccaccagactgtcttgagtagtgacttctttggtgaggcaagaaggatatacattattttagaatcatttactatttaaatgagacaatcatattattttagaatcatttattttaaatgagacaatcattttaagttttaagataacagaagtgaccaatgtaatttcacaacacctaaggattttttggttgatcaggttactgtagatttttactgattgtcctggatgaatagactgtgctttttctttttctctcccttccttcttggtttcccatagtataataagcatgcatactttaacttctatagttttctcctttagagggtcgtcttcagttttagaggtttacttctcccttgcctttgactcattggactagtgcagaggctttaagtagtttaaaatgggcttttgcttttctaggtcattaacgttttttatttagtttctttagccaatagtggctgagtttcgcacttgattttcaatattttatagtaagaaatgacaaactgctttgtttcatttcataaacaaactctgcatttagataactattaaaggttgttaagatgaagatttactgtttctttgttactcgttggtacagctgtttgttttacttgcacatttgtacatatacttaatgttttcaagtgccttaattgtttaaaatctctggcttcaaagtttcttggggaaaggtcggtttacctcacattttttgtttccattagtaatattctaggtacctcacaaaatgtattatggtgccatggctgttagtttttagtgagtgctgtaggattaattcgaaaataggcagaattccattcctcccaaggtggcaaaaattagctatactgatgtaattgtcatttacctgggtatgaattccctgacacacattcatgtcaacatatgtagcaaattttgtgaaaacataacaatttgaagcttctgtaattttgagcactgctctaacaacaagcataatataaaattagttagattttgcaagtctacaaatgagctcttgcaacagaactcacagcctttttacttttttcccctaactttagcaatgtagtatcttgagccattaatttttgggtttttttaaaatccagaaggtatatagaaaccttttcagatttttcatctgatttgttcttgcagatgttcttctatcaaataccttattttaccttacagatatttgttgcacaggcagatactgctgtatttagacatttctatttcagttcattaaaaactgcaaaaccaatctgtatcatgtaccaaactgacttaaaataaatctacatgtttattgaatt

SEQ ID NO: 93 - DNA, 2968 bp, Homo sapiens
  source 1..2968: mol_type = genomic DNA
cggcgccgcaggggattgaggggttgactgagcgttgcgagccttagctttctcccgaacgccagcgctgaggacacgatgtcgcggctctcccgctcactgctttgggccgccacctgcctgggcgtgctctgcgtgctgtccgcggacaagaacacgacccagcacccgaacgtgacgactttagcgcccatctccaacgtaacctcggcgccggtgacgtccctcccgctggtcaccactccggcaccagaaacctgtgaaggtcgaaacagctgcgtttcctgttttaatgttagcgttgttaatactacctgcttttggatagaatgtaaagatgagagctattgttcacataactcaacagttagtgattgtcaagtggggaacacgacagacttctgttccgctaaacccacagttcagccctccccttctacaacttccaagacagttactacatcaggtacaacaaataacactgtgactccaacctcacaacctgtgcgaaagtctacctttgatgcagccagtttcattggaggaattgtcctggtcttgggtgtgcaggctgtaattttctttctttataaattctgcaaatctaaagaacgaaattaccacactctgtaaacagacccattgaattaataaggactggtgattcatttgtgtaactcactgaagccaaaatactatcttttaagatgtcccacatggaagacgctattccaggatctttaaatttccatggatgcatataggatgtttgggagcatcatccgtgaagaaaaaatcaattaaatcattgtgttcaacaggaatatttaaaatattctgcatgaatcctgtggctgtcttattttaaatagctgctgctgtgggattatattttttttccttaacatgccaaatataactttctgaaagtgatggaaaatgttgtcttgtgcagacaacatcatggctcttggcagtttaaatttagtaattttaatttagtgaacagaattgagaagaacgtgccaaatgagaatcaattaggtggatttttggctgtcatttcaaaagtggaataaatttattaatttagtagtactaaatggtatccttagattaaaattttgtgcttgataacagctgttttttctacattagaaataagatgccacacaaggaactacattccagatttaaagaaatgaaaggataccattagtgtgtataacagattattgttcatacttgtaaagcatcttatgtcattgagaatataaagaacagtgccttagaagacagtgaaaggtaagctctagcttaatgtctatgatttgttctttgacattaaggaaggtaaggattggtcagaggatgtaacttgatgtgagcagtagtaaacctgttttagatatcatactgttaatattttattgaaaatttatttcagagcggagaaacttaagctaaagtctgttatacagaattgaaagccttcgtatcttgaacctcccaacatttttcttatggctgttgaaaagtatagagctaaattgatttaattacactttcctttgtactttaaaaaaaagtatgctagcactattgtaccttgaaaggatttccaccagactgtcttgagtagtgacttctttggtgaggcaagaaggatatacattattttagaatcatttactatttaaatgagacaatcatattattttagaatcatttattttaaatgagacaatcattttaagttttaagataacagaagtgaccaatgtaatttcacaacacctaaggattttttggttgatcaggttactgtagatttttactgattgtcctggatgaatagactgtgctttttctttttctctcccttccttcttggtttcccatagtataataagcatgcatactttaacttctatagttttctcctttagagggtcgtcttcagttttagaggtttacttctcccttgcctttgactcattggactagtgcagaggctttaagtagtttaaaatgggcttttgcttttctaggtcattaacgttttttatttagtttctttagccaatagtggctgagtttcgcacttgattttcaatattttatagtaagaaatgacaaactgctttgtttcatttcataaacaaactctgcatttagataactattaaaggttgttaagatgaagatttactgtttctttgttactcgttggtacagctgtttgttttacttgcacatttgtacatatacttaatgttttcaagtgccttaattgtttaaaatctctggcttcaaagtttcttggggaaaggtcggtttacctcacattttttgtttccattagtaatattctaggtacctcacaaaatgtattatggtgccatggctgttagtttttagtgagtgctgtaggattaattcgaaaataggcagaattccattcctcccaaggtggcaaaaattagctatactgatgtaattgtcatttacctgggtatgaattccctgacacacattcatgtcaacatatgtagcaaattttgtgaaaacataacaatttgaagcttctgtaattttgagcactgctctaacaacaagcataatataaaattagttagattttgcaagtctacaaatgagctcttgcaacagaactcacagcctttttacttttttcccctaactttagcaatgtagtatcttgagccattaatttttgggtttttttaaaatccagaaggtatatagaaaccttttcagatttttcatctgatttgttcttgcagatgttcttctatcaaataccttattttaccttacagatatttgttgcacaggcagatactgctgtatttagacatttctatttcagttcattaaaaactgcaaaaccaatctgtatcatgtaccaaactgacttaaaataaatctacatgtttattgaatt

SEQ ID NO: 94 - DNA, 3010 bp, Homo sapiens
  source 1..3010: mol_type = genomic DNA
gattgaggggttgactgagcgttgcgagccttagctttctcccgaacgccagcgctgaggacacgatgtcgcggctctcccgctcactgctttgggccgccacctgcctgggcgtgctctgcgtgctgtccgcggacaagaacacgacccagcacccgaacgtgacgactttagcgcccatctccaacgtaacctcggcgccggtgacgtccctcccgctggtcaccactccggcaccagaaacctgtgaaggtcgaaacagctgcgtttcctgttttaatgttagcgttgttaatactacctgcttttggatagaatgtaaagatgagagctattgttcacataactcaacagttagtgattgtcaagtggggaacacgacagacttctgttccgtttccacggccactccagtgccaacagccaattctacagctaaacccacagttcagccctccccttctacaacttccaagacagttactacatcaggtacaacaaataacactgtgactccaacctcacaacctgtgcgaaagtctacctttgatgcagccagtttcattggaggaattgtcctggtcttgggtgtgcaggctgtaattttctttctttataaattctgcaaatctaaagaacgaaattaccacactctgtaaacagacccattgaattaataaggactggtgattcatttgtgtaactcactgaagccaaaatactatcttttaagatgtcccacatggaagacgctattccaggatctttaaatttccatggatgcatataggatgtttgggagcatcatccgtgaagaaaaaatcaattaaatcattgtgttcaacaggaatatttaaaatattctgcatgaatcctgtggctgtcttattttaaatagctgctgctgtgggattatattttttttccttaacatgccaaatataactttctgaaagtgatggaaaatgttgtcttgtgcagacaacatcatggctcttggcagtttaaatttagtaattttaatttagtgaacagaattgagaagaacgtgccaaatgagaatcaattaggtggatttttggctgtcatttcaaaagtggaataaatttattaatttagtagtactaaatggtatccttagattaaaattttgtgcttgataacagctgttttttctacattagaaataagatgccacacaaggaactacattccagatttaaagaaatgaaaggataccattagtgtgtataacagattattgttcatacttgtaaagcatcttatgtcattgagaatataaagaacagtgccttagaagacagtgaaaggtaagctctagcttaatgtctatgatttgttctttgacattaaggaaggtaaggattggtcagaggatgtaacttgatgtgagcagtagtaaacctgttttagatatcatactgttaatattttattgaaaatttatttcagagcggagaaacttaagctaaagtctgttatacagaattgaaagccttcgtatcttgaacctcccaacatttttcttatggctgttgaaaagtatagagctaaattgatttaattacactttcctttgtactttaaaaaaaagtatgctagcactattgtaccttgaaaggatttccaccagactgtcttgagtagtgacttctttggtgaggcaagaaggatatacattattttagaatcatttactatttaaatgagacaatcatattattttagaatcatttattttaaatgagacaatcattttaagttttaagataacagaagtgaccaatgtaatttcacaacacctaaggattttttggttgatcaggttactgtagatttttactgattgtcctggatgaatagactgtgctttttctttttctctcccttccttcttggtttcccatagtataataagcatgcatactttaacttctatagttttctcctttagagggtcgtcttcagttttagaggtttacttctcccttgcctttgactcattggactagtgcagaggctttaagtagtttaaaatgggcttttgcttttctaggtcattaacgttttttatttagtttctttagccaatagtggctgagtttcgcacttgattttcaatattttatagtaagaaatgacaaactgctttgtttcatttcataaacaaactctgcatttagataactattaaaggttgttaagatgaagatttactgtttctttgttactcgttggtacagctgtttgttttacttgcacatttgtacatatacttaatgttttcaagtgccttaattgtttaaaatctctggcttcaaagtttcttggggaaaggtcggtttacctcacattttttgtttccattagtaatattctaggtacctcacaaaatgtattatggtgccatggctgttagtttttagtgagtgctgtaggattaattcgaaaataggcagaattccattcctcccaaggtggcaaaaattagctatactgatgtaattgtcatttacctgggtatgaattccctgacacacattcatgtcaacatatgtagcaaattttgtgaaaacataacaatttgaagcttctgtaattttgagcactgctctaacaacaagcataatataaaattagttagattttgcaagtctacaaatgagctcttgcaacagaactcacagcctttttacttttttcccctaactttagcaatgtagtatcttgagccattaatttttgggtttttttaaaatccagaaggtatatagaaaccttttcagatttttcatctgatttgttcttgcagatgttcttctatcaaataccttattttaccttacagatatttgttgcacaggcagatactgctgtatttagacatttctatttcagttcattaaaaactgcaaaaccaatctgtatcatgtaccaaactgacttaaaataaatctacatgtttattgaaaaaaaaaaaaaaaaaaaa

SEQ ID NO: 95 - DNA, 1294 bp, Homo sapiens
  source 1..1294: mol_type = genomic DNA
gtagtctcggaggcggcgccgcaggggattgaggggttgactgagcgttgcgagccttagctttctcccgaacgccagcgctgaggacacgatgtcgcggctctcccgctcactgctttgggccgccacctgcctgggcgtgctctgcgtgctgtccgcggacaagaacacgacccagcacccgaacgtgacgactttagcgcccatctccaacgtaacctcggcgccggtgacgtccctcccgctggtcaccactccggcaccagaaacctgtgaaggtcgaaacagctgcgtttcctgttttaatgttagcgttgttaatactacctgcttttggatagaatgtaaagatgagagctattgttcacataactcaacagttagtgattgtcaagtggggaacacgacagacttctgttccgtttccacggccactccagtgccaacagccaattctacaggtacaacaaataacactgtgactccaacctcacaacctgtgcgaaagtctaccttctttgacattaaggaaggtaaggattggtcagaggatgtaacttgatgtgagcagtagtaaacctgttttagatatcatactgttaatattttattgaaaatttatttcagagcggagaaacttaagctaaagtctgttatacagaattgaaagccttcgtatcttgaacctcccaacatttttcttatggctgttgaaaagtatagagctaaattgatttaattacactttcctttgtactttaaaaaaaagtatgctagcactattgtaccttgaaaggatttccaccagactgtcttgagtagtgacttctttggtgaggcaagaaggatatacattattttagaatcatttactatttaaatgagacaatcatattattttagaatcatttattttaaatgagacaatcattttaagttttaagataacagaagtgaccaatgtaatttcacaacacctaaggattttttggttgatcaggttactgtagatttttactgattgtcctggatgaatagactgtgctttttctttttctctcccttccttcttggtttcccatagtataataagcatgcatactttaacttctatagttttctcctttagagggtcgtcttcagttttagaggtttacttctcccttgcctttgactcattggactagtgcagaggctttaagtagtttaaaatgggcttttgcttttctaggtcattaacgttttttatttagtttctttagccaatagtggctgagtttcgcacttgattttc

SEQ ID NO: 96 - DNA, 1386 bp, Homo sapiens
  source 1..1386: mol_type = genomic DNA
agctttctcccgaacgccagcgctgaggacacgatgtcgcggctctcccgctcactgctttgggccgccacctgcctgggcgtgctctgcgtgctgtccgcggacaagaacacgacccagcacccgaacgtgacgactttagcgcccatctccaacgtaacctcggcgccggtgacgtccctcccgctggtcaccactccggcaccagaaacctgtgaaggtcgaaacagctgcgtttcctgttttaatgttagcgttgttaatactacctgcttttggatagaatgtaaagatgagagctattgttcacataactcaacagttagtgattgtcaagtggggaacacgacagacttctgttccgtttccacggccactccagtgccaacagccaattctacaggtacaacaaataacactgtgactccaacctcacaacctgtgcgaaagtctacctttgatgcagccagtttcattggaggaattgtcctggtcttgggtgtgcaggctgtaattttctttctttataaattctgcaaatctaaagaacgaaattaccacactctgtaaacagacccattgaattaataaggactggtgattcatttgtgtaactcactgaagccaaaatactatcttttaagatgtcccacatggaagacgctattccaggatctttaaatttccatggatgcatataggatgtttgggagcataatccgtgaagaaaaaatcaattaaatcattgtgttcaacaggaatatttaaaatattctgcatgaatcctgtggctgtcttattttaaatagctgctgctgtgggattatattttttttccttaacatgccaaatataactttctgaaagtgatggaaaatgttgtcttgtgcagacaacatcatggctcttggcagtttaaatttagtaattttaatttagtgagcagaattgagaagaacgtgccaaatgagaatcaattaggtggatttttggctgtcatttcaaaagtggaataaatttattaatttagtagtactaaatggtatccttagattaaaattttgtgcttgataacagctgttttttctacattagaaataagatgccacacaaggaactacattccagatttaaagaaatgaaaggataccattagtgtgtataacagattattgttcatacttgtaaagcaccttatgtcattgagaatataaagaacagtgccttagaagacagtgaaaggtaagctctagcttaatgtctatgatttgttctttgacattaaggaaggtaaggattggtcagaggatgtaacttgatgtgagcagtagtaaacctgttttagatatcgtactgttaatattttattgaaaatttatttcagag

SEQ ID NO: 97 - DNA, 1386 bp, Homo sapiens
  source 1..1386: mol_type = genomic DNA
gctttctcccgaacgccagcgctgaggacacgatgtcgcggctctcccgctcactgctttgggccgccacctgcctgggcgtgctctgcgtgctgtccgcggacaagaacacgacccagcacccgaacgtgacgactttagcgcccatctccaacgtaacctcggcgccggtgacgtccctcccgctggtcaccactccggcaccagaaacctgtgaaggtcgaaacagctgcgtttcctgttttaatgttagcgttgttaatactacctgcttttggatagaatgtaaagatgagagctattgttcacataactcaacagttagtgattgtcaagtggggaacacgacagacttctgttccgctaaacccacagttcagccctccccttctacaacttccaagacagttactacatcaggtacaacaaataacactgtgactccaacctcacaacctgtgcgaaagtctacctttgatgcagccagtttcattggaggaattgtcctggtcttgggtgtgcaggctgtaattttctttctttataaattctgcaaatctaaagaacgaaattaccacactctgtaaacagacccattgaattaataaggactggtgattcatttgtgtaactcactgaagccaaaatactatcttttaagatgtcccacatggaagacgctattccaggatctttaaatttccatggatgcatataggatgtttgggagcatcatccgtgaagaaaaaatcaattaaatcattgtgttcaacaggaatatttaaaatattctgcatgaatcctgtggctgtcttattttaaatagctgctgctgtgggattatattttttttccttaacatgccaaatataactttctgaaagtgatggaaaatgttgtcttgtgcagacaacatcatggctcttggcagtttaaatttagtaattttaatttagtgaacagaattgagaagaacgtgccaaatgagaatcaattaggtggatttttggctgtcatttcaaaagtggaataaatttattaatttagtagtactaaatggtatccttagattaaaattttgtgcttgataacagctgttttttctacattagaaataagatgccacacaaggaactacattccagatttaaagaaatgaaaggataccattagtgtgtacaacagattattgttcatacttgtaaagcaccttatgtcattgagaatataaagaacagtgccttagaagacagtgaaaggtaagctctagcttaatgtctatgatttgttctttgacattaaggaaggtaaggattggtcagaggatgtaacttgatgtgagcagtagtaaacctgttttagatatcatactgttaatattttatt

SEQ ID NO: 98 - DNA, 537 bp, Homo sapiens
  source 1..537: mol_type = genomic DNA
atgtcgcggctctcccgctcactgctttgggccgccacctgcctgggcgtgctctgcgtgctgtccgcggacaagaacacgacccagcacccgaacgtgacgactttagcgcccatctccaacgtaacctcggcgccggtgacgtccctcccgctggtcaccactccggcaccagaaacctgtgaaggtcgaaacagctgcgtttcctgttttaatgttagcgttgttaatactacctgcttttggatagaatgtaaagatgagagctattgttcacataactcaacagttagtgattgtcaagtggggaacacgacagacttctgttccgtttccacggccactccagtgccaacagccaattctacaggtacaacaaataacactgtgactccaacctcacaacctgtgcgaaagtctacctttgatgcagccagtttcattggaggaattgtcctggtcttgggtgtgcaggctgtaattttctttctttataaattctgcaaatctaaagaacgaaattaccacactctgtaa

SEQ ID NO: 99 - DNA, 594 bp, Homo sapiens
  source 1..594: mol_type = genomic DNA
atgtcgcggctctcccgctcactgctttgggccgccacctgcctgggcgtgctctgcgtgctgtccgcggacaagaacacgacccagcacccgaacgtgacgactttagcgcccatctccaacgtaacctcggcgccggtgacgtccctcccgctggtcaccactccggcaccagaaacctgtgaaggtcgaaacagctgcgtttcctgttttaatgttagcgttgttaatactacctgcttttggatagaatgtaaagatgagagctattgttcacataactcaacagttagtgattgtcaagtggggaacacgacagacttctgttccgtttccacggccactccagtgccaacagccaattctacagctaaacccacagttcagccctccccttctacaacttccaagacagttactacatcaggtacaacaaataacactgtgactccaacctcacaacctgtgcgaaagtctacctttgatgcagccagtttcattggaggaattgtcctggtcttgggtgtgcaggctgtaattttctttctttataaattctgcaaatctaaagaacgaaattaccacactctgtaa

SEQ ID NO: 100 - DNA, 590 bp, Homo sapiens
  source 1..590: mol_type = genomic DNA
atgtcgcggctctcccgctcactgctttgggccgccacctgcctgggcgtgctctgcgtgctgtccgcggacaagaacacgacccagcacccgaacgtgacgactttagcgcccatctccaacgtaacctcggcgccggtgacgtccctcccgctggtcaccactccggcaccagaaacctgtgaaggtcgaaacagctgcgtttcctgttttaatgttagcgttgttaatactacctgcttttggatagaatgtaaagatgagagctactgttcacataactcaacagttagtgattgtcaagtggggaacacgacagacttctgttccgtttccacggcccagtgccaacagccaattctacagctaaacccacagttcagccctccccttctacaacttccaagacagttactacatcaggtacaacaaataacactgtgactccaacctcacaacctgtgcgaaagtctacctttgatgcagccagtttcattggaggaattgtcctggtcttgggtgtgcaggctgtaattttctttctttataaattctgcaaatctaaagaacgaaattaccacactctgtaa

SEQ ID NO: 101 - DNA, 683 bp, Homo sapiens
  source 1..683: mol_type = genomic DNA
agtctcggaggcggcgccgcaggggattgaggggttgactgagcgttgcgagccttagctttctcccgaacgccagcgctgaggacacgatgtcgcggctctcccgctcactgctttgggccgccacctgcctgggcgtgctctgcgtgctgtccgcggacaagaacacgacccagcacccgaacgtgacgactttagcgcccatctccaacgtaacctcggcgccggtgacgtccctcccgctggtcaccactccggcaccagaaacctgtgaaggtcgaaacagctgcgtttcctgttttaatgttagcgttgttaatactacctgcttttggatagaatgtaaagatgagagctattgttcacataactcaacagttagtgattgtcaagtggggaacacgacagacttctgttccgtttccacggccactccagtgccaacagccaattctacagctaaacccacagttcagccctccccttctacaacttccaagacagttactacatcaggtacaacaaataacactgtgactccaacctcacaacctgtgcgaaagtctacctttgatgcagccagtttcattggaggaattgtcctggtcttgggtgtgcaggctgtaattttctttctttataaattctgcaaatctaaagaacgaaattaccacactctgtaa

SEQ ID NO: 102 - DNA, 3106 bp, Homo sapiens
  source 1..3106: mol_type = genomic DNA
atcgtccgagccccacctccctcctcttcgcccccgcacgccgaaaacaggggcctctcacgtgacccctgcgcgctcccgcgggggagcgtagtctcggaggcggcgccgcaggggattgaggggttgactgagcgttgcgagccttagctttctcccgaacgccagcgctgaggacacgatgtcgcggctctcccgctcactgctttgggccgccacctgcctgggcgtgctctgcgtgctgtccgcggacaagaacacgacccagcacccgaacgtgacgactttagcgcccatctccaacgtaacctcggcgccggtgacgtccctcccgctggtcaccactccggcaccagaaacctgtgaaggtcgaaacagctgcgtttcctgttttaatgttagcgttgttaatactacctgcttttggatagaatgtaaagatgagagctattgttcacataactcaacagttagtgattgtcaagtggggaacacgacagacttctgttccgtttccacggcccagtgccaacagccaattctacagctaaacccacagttcagccctccccttctacaacttccaagacagttactacatcaggtacaacaaataacactgtgactccaacctcacaacctgtgcgaaagtctacctttgatgcagccagtttcattggaggaattgtcctggtcttgggtgtgcaggctgtaattttctttctttataaattctgcaaatctaaagaacgaaattaccacactctgtaaacagacccattgaattaataaggactggtgattcatttgtgtaactcactgaagccaaaatactatcttttaagatgtcccacatggaagacgctattccaggatctttaaatttccatggatgcatataggatgtttgggagcatcatccgtgaagaaaaaatcaattaaatcattgtgttcaacaggaatatttaaaatattctgcatgaatcctgtggctgtcttattttaaatagctgctgctgtgggattatattttttttccttaacatgccaaatataactttctgaaagtgatggaaaatgttgtcttgtgcagacaacatcatggctcttggcagtttaaatttagtaattttaatttagtgaacagaattgagaagaacgtgccaaatgagaatcaattaggtggatttttggctgtcatttcaaaagtggaataaatttattaatttagtagtactaaatggtatccttagattaaaattttgtgcttgataacagctgttttttctacattagaaataagatgccacacaaggaactacattccagatttaaagaaatgaaaggataccattagtgtgtataacagattattgttcatacttgtaaagcatcttatgtcattgagaatataaagaacagtgccttagaagacagtgaaaggtaagctctagcttaatgtctatgatttgttctttgacattaaggaaggtaaggattggtcagaggatgtaacttgatgtgagcagtagtaaacctgttttagatatcatactgttaatattttattgaaaatttatttcagagcggagaaacttaagctaaagtctgttatacagaattgaaagccttcgtatcttgaacctcccaacatttttcttatggctgttgaaaagtatagagctaaattgatttaattacactttcctttgtactttaaaaaaaagtatgctagcactattgtaccttgaaaggatttccaccagactgtcttgagtagtgacttctttggtgaggcaagaaggatatacattattttagaatcatttactatttaaatgagacaatcatattattttagaatcatttattttaaatgagacaatcattttaagttttaagataacagaagtgaccaatgtaatttcacaacacctaaggattttttggttgatcaggttactgtagatttttactgattgtcctggatgaatagactgtgctttttctttttctctcccttccttcttggtttcccatagtataataagcatgcatactttaacttctatagttttctcctttagagggtcgtcttcagttttagaggtttacttctcccttgcctttgactcattggactagtgcagaggctttaagtagtttaaaatgggcttttgcttttctaggtcattaacgttttttatttagtttctttagccaatagtggctgagtttcgcacttgattttcaatattttatagtaagaaatgacaaactgctttgtttcatttcataaacaaactctgcatttagataactattaaaggttgttaagatgaagatttactgtttctttgttactcgttggtacagctgtttgttttacttgcacatttgtacatatacttaatgttttcaagtgccttaattgtttaaaatctctggcttcaaagtttcttggggaaaggtcggtttacctcacattttttgtttccattagtaatattctaggtacctcacaaaatgtattatggtgccatggctgttagtttttagtgagtgctgtaggattaattcgaaaataggcagaattccattcctcccaaggtggcaaaaattagctatactgatgtaattgtcatttacctgggtatgaattccctgacacacattcatgtcaacatatgtagcaaattttgtgaaaacataacaatttgaagcttctgtaattttgagcactgctctaacaacaagcataatataaaattagttagattttgcaagtctacaaatgagctcttgcaacagaactcacagcctttttacttttttcccctaactttagcaatgtagtatcttgagccattaatttttgggtttttttaaaatccagaaggtatatagaaaccttttcagatttttcatctgatttgttcttgcagatgttcttctatcaaataccttattttaccttacagatatttgttgcacaggcagatactgctgtatttagacatttctatttcagttcattaaaaactgcaaaaccaatctgtatcatgtaccaaactgacttaaaataaatctacatgtttattgaatt

SEQ ID NO: 103 - DNA, 2993 bp, Homo sapiens
  source 1..2993: mol_type = genomic DNA
ggattgaggggttgactgagcgttgcgagccttagctttctcccgaacgccagcgctgaggacacgatgtcgcggctctcccgctcactgctttgggccgccacctgcctgggcgtgctctgcgtgctgtccgcggacaagaacacgacccagcacccgaacgtgacgactttagcgcccatctccaacgtaacctcggcgccggtgacgtccctcccgctggtcaccactccggcaccagaaacctgtgaaggtcgaaacagctgcgtttcctgttttaatgttagcgttgttaatactacctgcttttggatagaatgtaaagatgagagctattgttcacataactcaacagttagtgattgtcaagtggggaacacgacagacttctgttccgtttccacggccactccagtgccaacagccaattctacagctaaacccacagttcagccctccccttctacaacttccaagacagttactacatcaggtacaacaaataacactgtgactccaacctcacaacctgtgcgaaagtctacctttgatgcagccagtttcattggaggaattgtcctggtcttgggtgtgcaggctgtaattttctttctttataaattctgcaaatctaaagaacgaaattaccacactctgtaaacagacccattgaattaataaggactggtgattcatttgtgtaactcactgaagccaaaatactatcttttaagatgtcccacatggaagacgctattccaggatctttaaatttccatggatgcatataggatgtttgggagcatcatccgtgaagaaaaaatcaattaaatcattgtgttcaacaggaatatttaaaatattctgcatgaatcctgtggctgtcttattttaaatagctgctgctgtgggattatattttttttccttaacatgccaaatataactttctgaaagtgatggaaaatgttgtcttgtgcagacaacatcatggctcttggcagtttaaatttagtaattttaatttagtgaacagaattgagaagaacgtgccaaatgagaatcaattaggtggatttttggctgtcatttcaaaagtggaataaatttattaatttagtagtactaaatggtatccttagattaaaattttgtgcttgataacagctgttttttctacattagaaataagatgccacacaaggaactacattccagatttaaagaaatgaaaggataccattagtgtgtataacagattattgttcatacttgtaaagcatcttatgtcattgagaatataaagaacagtgccttagaagacagtgaaaggtaagctctagcttaatgtctatgatttgttctttgacattaaggaaggtaaggattggtcagaggatgtaacttgatgtgagcagtagtaaacctgttttagatatcatactgttaatattttattgaaaatttatttcagagcggagaaacttaagctaaagtctgttatacagaattgaaagccttcgtatcttgaacctcccaacatttttcttatggctgttgaaaagtatagagctaaattgatttaattacactttcctttgtactttaaaaaaaagtatgctagcactattgtaccttgaaaggatttccaccagactgtcttgagtagtgacttctttggtgaggcaagaaggatatacattattttagaatcatttactatttaaatgagacaatcatattattttagaatcatttattttaaatgagacaatcattttaagttttaagataacagaagtgaccaatgtaatttcacaacacctaaggattttttggttgatcaggttactgtagatttttactgattgtcctggatgaatagactgtgctttttctttttctctcccttccttcttggtttcccatagtataataagcatgcatactttaacttctatagttttctcctttagagggtcgtcttcagttttagaggtttacttctcccttgcctttgactcattggactagtgcagaggctttaagtagtttaaaatgggcttttgcttttctaggtcattaacgttttttatttagtttctttagccaatagtggctgagtttcgcacttgattttcaatattttatagtaagaaatgacaaactgctttgtttcatttcataaacaaactctgcatttagataactattaaaggttgttaagatgaagatttactgtttctttgttactcgttggtacagctgtttgttttacttgcacatttgtacatatacttaatgttttcaagtgccttaattgtttaaaatctctggcttcaaagtttcttggggaaaggtcggtttacctcacattttttgtttccattagtaatattctaggtacctcacaaaatgtattatggtgccatggctgttagtttttagtgagtgctgtaggattaattcgaaaataggcagaattccattcctcccaaggtggcaaaaattagctatactgatgtaattgtcatttacctgggtatgaattccctgacacacattcatgtcaacatatgtagcaaattttgtgaaaacataacaatttgaagcttctgtaattttgagcactgctctaacaacaagcataatataaaattagttagattttgcaagtctacaaatgagctcttgcaacagaactcacagcctttttacttttttcccctaactttagcaatgtagtatcttgagccattaatttttgggtttttttaaaatccagaaggtatatagaaaccttttcagatttttcatctgatttgttcttgcagatgttcttctatcaaataccttattttaccttacagatatttgttgcacaggcagatactgctgtatttagacatttctatttcagttcattaaaaactgcaaaaccaatctgtatcatgtaccaaactgacttaaaataaatctacatgtttattgaa

SEQ ID NO: 104 - DNA, 1402 bp, Homo sapiens
  source 1..1402: mol_type = genomic DNA
gttcgtgtctcagacttgagtctgagaaggtcgcttgagatttaattacattggttttgcagataggaatagaatgtagctgacgtttgagcacgtagttagtgaaaacttcacacttcaaagtatgcgaaaaggaagaaaagtacccatgtatgtaccgggtgttttgcgtacgtatcctaaggctaaactggaagaaacctgtgaaggtcgaaacagctgcgtttcctgttttaatgttagcgttgttaatactacctgcttttggatagaatgtaaagatgagagctattgttcacataactcaacagttagtgattgtcaagtggggaacacgacagacttctgttccgtttccacggccactccagtgccaacagccaattctacagctaaacccacagttcagccctccccttctacaacttccaagacagttactacatcaggtacaacaaataacactgtgactccaacctcacaacctgtgcgaaagtctacctttgatgcagccagtttcattggaggaattgtcctggtcttgggtgtgcaggctgtaattttctttctttataaattctgcaaatctaaagaacgaaattaccacactctgtaaacagacccattgaattaataaggactggtgattcatttgtgtaactcactgaagccaaaatactatcttttaagatgtcccacatggaagacgctattccaggatctttaaatttccatggatgcatataggatgtttgggagcatcatccgtgaagaaaaaatcaattaaatcattgtgttcaacaggaatatttaaaatattctgcatgaatcctgtggctgtcttattttaaatagctgctgctgtgggattatattttttttccttaacatgccaaatataactttctgaaagtgatggaaaatgttgtcttgtgcagacaacatcatggctcttggcagtttaaatttagtaattttaatttagtgaacagaattgagaagaacgtgccaaatgagaatcaattaggtggatttttggctgtcatttcaaaagtggaataaatttattaatttagtagtactaaatggtatccttagattaaaattttgtgcttgataacagctgttttttctacattagaaataagatgccacacaaggaactacattccagatttaaagaaatgaaaggataccattagtgtgtataacagattattgttcatacttgtaaagcatcttatgtcattgagaatataaagaacagtgccttagaagacagtgaaaggtaagctctagcttaatgtctatgatttgttctttgacattaaggaaggtaaggattggtcagaggatgtaacttgatgtgagcagtagtaaacctgttttagatatcatactg

SEQ ID NO: 105 - protein, 163 aa, Homo sapiens
MRKGRKVPMYVPGVLRTYPKAKLEETCEGRNSCVSCFNVSVVNTTCFWIECKDESYCSHNSTVSDCQVGNTTDFCSVSTATPVPTANSTAKPTVQPSPSTTSKTVTTSGTTNNTVTPTSQPVRKSTFDAASFIGGIVLVLGVQAVIFFLYKFCKSKERNYHTL

SEQ ID NO: 106 - protein, 189 aa, Homo sapiens
MSRLSRSLLWAATCLGVLCVLSADKNTTQHPNVTTLAPISNVTSAPVTSLPLVTTPAPETCEGRNSCVSCFNVSVVNTTCFWIECKDESYCSHNSTVSDCQVGNTTDFCSVSTATPVPTANSTAKPTVQPSPSTTSKTVTTSGTTNNTVTPTSQPVRKSTFDAASFIGGIVLVLEIRCHTRNYIPDLKK

SEQ ID NO: 107 - protein, 197 aa, Homo sapiens
MSRLSRSLLWAATCLGVLCVLSADKNTTQHPNVTTLAPISNVTSAPVTSLPLVTTPAPETCEGRNSCVSCFNVSVVNTTCFWIECKDESYCSHNSTVSDCQVGNTTDFCSVSTATPVPTANSTAKPTVQPSPSTTSKTVTTSGTTNNTVTPTSQPVRKSTFDAASFIGGIVLVLGVQAVIFFLYKFCKSKERNYHTL

SEQ ID NO: 108 - protein, 184 aa, Homo sapiens
MSRLSRSLLWAATCLGVLCVLSADKNTTQHPNVTTLAPISNVTSAPVTSLPLVTTPAPETCEGRNSCVSCFNVSVVNTTCFWIECKDESYCSHNSTVSDCQVGNTTDFCSAKPTVQPSPSTTSKTVTTSGTTNNTVTPTSQPVRKSTFDAASFIGGIVLVLGVQAVIFFLYKFCKSKERNYHTL

SEQ ID NO: 109 - protein, 178 aa, Homo sapiens
MSRLSRSLLWAATCLGVLCVLSADKNTTQHPNVTTLAPISNVTSAPVTSLPLVTTPAPETCEGRNSCVSCFNVSVVNTTCFWIECKDESYCSHNSTVSDCQVGNTTDFCSVSTATPVPTANSTGTTNNTVTPTSQPVRKSTFDAASFIGGIVLVLGVQAVIFFLYKFCKSKERNYHTL

SEQ ID NO: 110 - protein, 157 aa, Homo sapiens
MSRLSRSLLWAATCLGVLCVLSADKNTTQHPNVTTLAPISNVTSAPVTSLPLVTTPAPETCEGRNSCVSCFNVSVVNTTCFWIECKDESYCSHNSTVSDCQVGNTTDFCSVSTATPVPTANSTAKPTVQPSPSTTSKTVTTSEIRCHTRNYIPDLKK

SEQ ID NO: 111 - protein, 156 aa, Homo sapiens
MSRLSRSLLWAATCLGVLCVLSADKNTTQHPNVTTLAPISNVTSAPVTSLPLVTTPAPETCEGRNSCVSCFNVSVVNTTCFWIECKDESYCSHNSTVSDCQVGNTTDFCSVSTATPVPTANSTGTTNNTVTPTSQPVRKSTFFDIKEGKDWSEDVT

SEQ ID NO: 112 - protein, 147 aa, Homo sapiens
MSRLSRSLLWAATCLGVLCVLSADKNTTQHPNVTTLAPISNVTSAPVTSLPLVTTPAPETCEGRNSCVSCFNVSVVNTTCFWIECKDESYCSHNSTVSDCQVGNTTDFCSVSTAQCQQPILQLNPQFSPPLLQLPRQLLHQVQQITL

SEQ ID NO: 113 - DNA, 47403 bp, Homo sapiens
  source 1..47403: mol_type = genomic DNA
agcaatctatcagggaacggcggtggccggtgcggcgtgttcggtggcggctctggccgctcaggcgcctgcggctgggtgagcgcacgcgaggcggcgaggcggcagcgtgtttctaggtcgtggcgtcgggcttccggagctttggcggcagctaggggaggatggcggagtcttcggataagctctatcgagtcgagtacgccaagagcgggcgcgcctcttgcaagaaatgcagcgagagcatccccaaggactcgctccggatggccatcatggtgcaggtgcgggccgctgtgcgggcggcggggcggggacgcggcgccccgggttaactgtgtccgggaaggctgggggagggcgggcccagggagcgagcgggcccgggccctcggagcggcacttggggcctatggggccgcggccgcccctcctcccgagcggcccggccgacccttccggaaggttttgctgatgttgcaggaaaagcccgggaaataaagtctgcagctggtgttgcctttcgctttgtgaaaacgaggagcctcttctcttctcctttctgggtggcggtgttttattactgccgttcgcctcaggggttgggggggaattgtacatggtctctttaagctaatctgattttgacctatcttgttctggagggtttttgttctacatggatggtggcgactgacatgtgggttttttttttttttgttaaacctatttttggcagtcatttcaacacgtcatttaaacgctcactctcattttttattttaattaggcagaactatgcagaaaggtgtcatttctgtacagtacattcactttgagcctaatttgtgctttaaagtaacattttccccaaattttccagattcacagacgcgttctcttggtgcatttgcagctgtctggtttgagtaagagtggctccaggggggtttctcatgtgggctttttgatagattgaatccccttctgaggtttcctgagccttctgtgaggtggtgggcttgaaggcccctgtcatttcccaggggctcctgcctccagcttccagtttgccgatgtctacctttgtattaataattctggttctcatctgccctgttcctcctcgcttccaacatattacccaagcttagtgctcatggtcaaggtagcttgattttcctcccttccatgagctgtaatgtgttttaggaatgaccagatatccctcagtggattttcagtacttagtacaagggagggcgacatttaccgagtggatacccaagtgccaggtgtacttccgttatcttatttcacaatatgcctgtcatcttggtgtcctcggggcatacctaagtcagtacgtggcacacagtgcttatttggtaggcattttttaagttctaagcactctgttaggttttaaggacacagaatccacctttgggaatttccagtttggttaaacgggaaatgactggtaaacaaacgttaccgtaagagaggatggatgccacctgatggagctgtgctctaggcattgtgtgcctaggagtccgagatgacccagctaagggtggaagcttgattaggagtcgttaattcacagaagtggagcagaaagatgagaatagggaagtagacagggcctacaatttgaagagccttgttgcccactaaggaacctagaacttactttgaatatacaaggcagcctgttatgaagttctcactcctggtgcaggagctcttaacccagggtctgtgggatggtaggtagaaggcaagaggtccatgagtttagataagaaaaaattgatatctccatctccactaacctctagataaaattatttcctctaatcataaatgtaagcagcaaagcaaaggcatattagcagtccctatttttttttcaccagtgataattacagatattttcatatcactttacagttggaagtttttcaaaatataatttactctcattgctacaaaaatcacagttattagaggctgtactagatcttgttatttaatgcttaaaagctcacgggttactgtacccaaattacctttcaaatgttttgataattatctcagtgtttccttttcgagcctttttgtttgttttgttttttgagatggggtctcactatgttgcccaggctggtctcaaactcctgagctcaagcgatccatgcacctcggccccacaaagtgctagggttacaggcatgagccaccgtgactggccatttgcgagcctttttattacgcatttttaaatgttattctgagaaagggacatccaggcgccttaacaggtgggcagagtaccgtgttctggtggaaagacaaacaaaacccaagtccagactgtgttgaggctagaacaacaccgctgtggaggaagttagaggaggcttagctgtgggggaggccggatggaggaaactgaacctgatcaagtttagcattctggggccgggcttggtggcgcatgcttgtaatctcagcactttgggaggctggggtgggcagattacttaagctcagcagtttgagaccagcctggccaacatggtgaaacctgtctctacaaaaaaatgcaatgattagcgggtcgtggtggtgcgtgcctgttaagtcccagctactccggaggctgaagctggaagattgcttgagcctgggaggtggaggttgcagtgagctgagatagtgccactgcactccagcctgggcgacagacccagacccagacccagaccctgtctgaaaaaaaaaatagtaataacaacattctgggctttcctttggtatacttgatagtgaaagaaactctttattattaaaagtaactgtgatttttatgtaatggtgattaagggtggattcagagttttaattcagaatttaaagttggtctggtagactgagctggtgaaggccaaaaagaaagaagccttttcacttgcttgaatttaaataccttcttttacatttacatgggagtattgttctctgagtatctgatacctgacactttagccctcatgcctggggcatcttgggagggatgagctgggccctccagcattttggtgggaggaggatggcggtagacctttgagttgctctgtcctgggagggtttgagcacccggaggcatgcagtgaggtcagttcattctctctgtggcctaggtggacaggtagcatggcctgttctgcacagaagggaacccagttcaccagctgctggttgggtgaggaccctggtatgttaggtgctcagtttttgcttgggtgcacagccaaagattctgtgccttgcctcagctgtgcagctaacaaatggagtcgatagtcttgtgaccttggtttggtgcctttctgccacatcattctcagtcctgagtttagggcaaagcattgctttggtcaggggtgcttctgctgaggctcttgtcctctaagcttgtgctgtgattgcaccattgggcagcacctccagggtgtccagcactgtgccggtggttgggggagacagcacccagaccaaagggcagcaggtctggggcccctggcagagccaggaagaagtgccatagccattacctgtgctctttatacaagggtaactggaacattgcacaggaagggtagacaaggggtagacaagcaggcagagccaggtcgaggccattgcaaatattccatgatagccagatgcttagggatctgtatcagcagcctaattgagatctggtggaacgtttgagagttggaacatgagtatgctctcagaaatgccatttgttgtctcttctacagcaggaatttccccatccttccttttttgttccatctgacttggagccctaagcaaacactgcgtgccctctgtgacatgttgctagagaatagcaagataggcccttatgaaataatcaccaaatgcatagttcttagtgaggggagctgtggaaggagcattgggagatctgagggagtgctctgaacagggctggagagcattccagacccaggggaaagctgatgttgaggagtccttgtgctgccatagtcttagctgtgcattttaatacatcacatccagaaagaggccactcacagtggagagagatagtggggtaccttatcattgcttttccagagtattttccctgtccccgcaactccatcctaaaaattcagcacatttacttttaatgctgttttaatagtcttattgcatctgtgtgacatttagctttatgttctataaaagcagatgtttgggacttcccttactttagtcagatcacagttggtgtatttttaagtagctcttcctgccgggcagtggagtgtggtgggaggaatcatagtgtcaaatcattcatttgctgcctctgtgactcccaaccccccaggcaaggatttccagccccactgtctccatctgtgaatgaaagggctggttcccacccagaggcagattgtgggattacacaggatggcttatgaaaggagcagggacacacactacatactgtgtcttccccttcttcccaatcgctgtcaccgtccactctgtaaagccaggactgggtgcagtggttcatgcctgtaatcccagcacttcgggaagccgaggcgggcgggtcacgaggtcagaagttcgagaccagcctggccaacatggtgaagccccattgctactaacaatacaaaaattagccaggcatgggtggcacgtgcctgtagtcccagctactcaggaggccgaggcaggagaatcgcttgaacccaggagacagaggttgcagtgagctgagatcgcaccactgcactcagtgcaagactcggtctcaaaaacaaagccagacagtgctcgaggcctgggagcagaacctgaccctgtcacaatgaaaggcctagtgggaagcaaaccacctggagaggggaactgtgttccctgtggccagacttctcaggtcctacgcctgggaaactgcgccccagaaggccagtgagcagctgactccagctctaggcatgctgccccgaaccatccgctgtcacagttgcctcaaagacctccattcattccactcccatctgtgtggctgctgcaagcttgacacttttttctgacacactttctctgctttgctcattatctgggacttgttccttgttattcttaactgcagaggcacttaaagagcccttttctggggcacacaggccctttgagtccaggcaagcctggagcagttgtctggccattcccagcagatgctgcaggattgtgactctgcacaagtgtcttctgtgcatttcactaggccatgaggcagctcaccactaaatgtagcagtgtgtggtcaaaagggacgtggggcagagctcagtggtaaaaggccacctttctcgtggctgtgtttggtgtcctaagagaatgagctcaagaacagtgggctacagtcttctgacccttggggaagatcgtgagaaggatgctgcagctcttcatgtgagagcggaggctgtcctcctttcacagataggagaacaaaagtttcatgtgctatcccactgctggggctgggactggggtcgaggtcaaggtcaaggtctagtgggtctaagtcaaaagttaactgcttacttacttccctctgtttctcttccttctagtcgcccatgtttgatggaaaagtcccacactggtaccacttctcctgcttctggaaggtgggccactccatccggcaccctgacgttgaggtggatgggttctctgagcttcggtgggatgaccagcagaaagtcaagaagacagcggaagctggaggagtgacaggtgtgtacatactggggcagcatgggcattcagcccccaccctgaagctcccaggagggcctcgtctcagagagcaaagcaaacctcccccagcttgccctctcccacatgtgcagatcaagcgtatggtgcccatgttatttcagcaacacctcctggactcagcatcatctgttgcatgatatttggtattttgtttttccaggtgcttggaatgtagcctttaaagttgttttgtttttaatatactttatttttgttcatggcaaaagtaagcaaagaacaaagagtttccagtaccccctccccctcccaccacacaggctcttccttgtcaacacctcccaccagagtagtacatttgttataattgaggaacctacactgacacatcattattgcccagagtccagaaactcctgatgctctacattctatgggtttggacaaatgtatgatgacatgcatctgccattatagtatcatacagagtagtttcagacctgcacccttctgcagcccccttaagattaaggaagaatagctcatctctgagaggggaatgaggtaggaggtggggctcagacaccaaaccaaaccgaggactaactaaagcagggacagggacgaagcagctttccataaaacacccaccagtgtgccatatcagtttaccattgccatggcaatacccggaagttaccacccctttctgtgacaacaatctgatgacctaaaagttaccaccccgtttcttaacatgtctgcatagtctgccccttaatttgcatataattaaaagtgggtgtaaatatgacttcagaactgcctttgagctgctgctctcagcacagtgcctgtggggtagccctgctctgcaggagcagtcacagagccataacactgctgcctcaataaagctgctttcttctaccacgagctcgctcttaaatgctttccagagcgaagccaaggacccgcccaggccaatccccaatttagggctggcctgccctgcatcagtttcactgctctaaaaatcccctgtttatccctcctaattcctgacaaccactgctctttttactgtctccacagttttctccttttatgtcttctcccatgtcttagtacaggtcacgtcaggtgacatagcagagcagaaagcaaagctattaaaagctttattaggagaggtaatcctagggcagcaagagagagggaggaaggggaggcaggagggcaagcacagtgccatacgctgtcaagctggccatggcttcatgagaaacagccaatggcttggtcatgcaggatgccctcacgcaagtcctttgccactaagcttcagaaaagcccctcggagcaggaggaagggagcagcattatccattggttctttctgcctcttgtttctcattggttttagctcgctggaggtgctgtggttctctgcacttccagactgtgttcctggcctctgcacagtcacgccctgcagccagagctgcctctagatctggaagtggcgggaggactctcagtccctggttttgaaagagttggcctgttggtgacagtgctgtgtttgttactgtggtggtcactacagggtgggtatgccagggtgtggcccttaccctgaggcagtgacagtgctagggaacaaggctgtggcaccagcagccactgtcaggtagcccaccctggggatacagatgaactacatccagtacgtgtaattttatggttccttatttcttttaacatctaaatgtttactctatttgagagttatcccggtgtgtgctgatgtgtggtgtgaggcgtgactccagttttatttttttccagatgatgatctagtttccctactttgtttttttgttgttgtttttgtttttgttttgttttcgagatggagtctcactctgttgcccaggctggagtgctgtggcatggtcttggctcactgccacctccgcctcccgggttcaggcgattctcctgcctcagcctcccgagtagcgtggtgcctgccaccatgcccagctaattttttgtactttgtttattggcttattcatctcccccattgagaggtgtcttgtatcatgcacaaaatctctgtattttggggtccttttaaaaatttctgttccattgtctgtttaacctttttttatatgtaaacttttttcgttgttgttggagacggattctcgctctgtcacccaagctggggtgcagtggtgtgatctcggctcaccgtaagctccgcctcccaggttcatgacattcttctgtatgtagactttttttcttatagcagttttaggttcacagcaaaattgagtaaagtacagagtttccatatacccgctagccctacccaccccacacatacacagacttttgtccacaatcaacatcgccaccagagtggtccatggttatagctgatgagctacattgacacatcgttatcggagtggtccatggttataactgatgagccacattgacacatcgttatccctcgaggtctgtagtttacatgagggctcactctttgcattgtacattctgtcagttttaacaaacatacattgacatgcatgtacctttatggtagcctccagagtcctttcactgcctgggaaatctctgtgctttgcctagtcattcctccctcccctctaacctccagtaaccactgatctttttgctttctccatagtttttccttttccagaatataatatagttggaatcatacagaaggtagccttttcagattggcttctctcactagcaatgtgctcttaagattcctccatgtcgagccgggcacggtggctcacatctgtaatcccagcactttgggaggccgagcccagcagattacgaggtcaggagttcgagaccagcctggccaatatggtgaaaccctgtctctattaaaaatacaaaaattagccggtgtggtggtgtgcacctgtagtcccagctactcgggaggccgagacaggagaattggttgtactgggaggcggaggttgcagtgagccgagatcatgccactgcactccagcctggcaacagagcgaaactccatctcaaaaaaaaaaaaaaaaaaagattcctccatgtcttgtcgtattgatagctcatttctttttattactgaataatattccattgtctggattaccacagtttgtttattcattgacctgctgaaggacatcttgattgcttccaagttttggtgattatgaacaaagctgctagaaacacccaccatgtgcaggtttttatggggacataagttttcaactcctttgggtaatcaaggagtacaattgctggatcatgtggtaagagtatatttagttttgtaagaaactgccaagctgtctttcaaaaagctgaatcattttccattcccaccagcaatagatgagagttcgtatcattatacatctttgccagcatttggtgttatcattgttttggattttggccattccaatagatatatagtattttattattgttttaatttgcatttccctaatactgtaattatcttgaacatcttctcatacgtttatttaccatctgtatatctttggtgaaatgtcttttgcctgcccctacccccactttttttttttttttttaagactgtcttgctccgtcgcccaggctagagtgcagtggtgtgatcacagttcgctgcagccttgacctctgtctcccacctcagcctcttgagtagctgggactacaggtgcgcaccaccatgcctggctaatttttttaaattttttgtagagacagggccccaccttgttgcccagactggtctcaaactcctggttttgctctttttaaaatcacattgtttgttttcttactgttgagtcctaagagttcttggtatattttggataacagccctttgtcatatgtcttttgaaaatattttttctcagtgtgtggctggtcttccgcagagcagaagttcttaattttgtgaagtctagttaatcagttacttctttagtggattgggcttttggtgtttgtaaaaagtcatcaccagacccaaggtcatatagattttcttctagaagtttaacagttttgtgtcttacatttaggtctgttatccattttggttactttttgtgaagggtgtaaggtctgtgtctagattcctttattttttttcttttttttttttcgcatgtggatgtccagttgttacagctccgtttgttgaaaagactatcttttctccatttttgcctttacttttttgtcaaagatcagtggactgtgcttgtgtggctctgtttctgggctccctgttctgtcccactgatctacgtatccttttgccagtaccacactgtgttgactgctgtggcttcatagtaagtctttaggttgggtagtgtcagtcctccaaccttgttactgtcatggcagaaggcagaggagaagccggcagttgacatggccggagcaggaggaagagagtgaaaggggaggtgctacacatttttcaacaaccagatctcaggagaactcacaagtatcatgacacagcaccaagggagaaatctgtcccggtgatccagtgacctcccaccaggccccacctccaacattcgggattataatttgataggagatttagtggggacacagatccaaaccatatcactgtctgcccttgcagcagctggtccttgcagctgttggtatgtctgactagctgcttactgcaaacaggttagtaacggctcagaattgggaattttaaaaagtaaataaatttgccaagaaagggttcagagggtgagtatgtcagatttaacagaggacagctctcattctgttgcctaggctggaatgtaccggcatgatcttagctcactgcagtttctaactcctgggctcaagcaatcctcccacgtcagcctctggagaagctaggactacagttgcccaactaattttttaactttttttttttttttttttttaagatagagacagagtctcactgtgttgcccaagggatcttgcttggcaagaccccaggctggtctcaaactcttggcttcaaacaatctcacctctgcctcccaaagcacagggtttataggcatgagcaaatacacctggctgacatttttgttgttctgtggctgttttctcttttgtattcaggataggggaagttgtaggtttaggggcatagatatgttatatctagttataatttaaatatacctgagtacatagataatctctgtcacccaggctggagtgcagtggtgccatctcagctcactgcaacctctgcctcccgggttgctgggattacaggtgtgtgccaccacacctggctgggtatttttagtagagatagagttttgccatattggccaggctgacctaagtgtaattttataatatgaaaaggcataatgattttactgaaaatgtgtctttttgtgaaaccatcataaccatacagttaggatactacctactaattgtccagggatttttcatccagagagcctaacttactatttttagatatatgaaaagtttaattcatcccaaatcctctaattcagaaatgacttattaacatgtgggatatctccatagaaaatactaatttgcttgtgagtgtgcttgattttctttctttcctgcagaattgagatcctactctaagtatcacttttcttacttgatttttttttttttttggtggcaaaataggcataacataaaatttaccttaacccttttctttttttaaaaaaaaatttttttgagacagggtcttgctctgtcgcccaggttggagtacagtggcgcaatcatggctcactgcatcctctgtctcccgggttcaggcgattcttctgcctcagcctcccaagtagctgggattacaggtgtgcgccaccacgtctggctaatttttgtatttttagtagagatggggtttcactgtgttggccaggctggtcttgaactcctgacctcaggtgatctacctgcctcggcctcccaaagtgctgggattataggcgtgagccactgcgcctggcctgtcttaaccatttttaagtgtagagttcagtggcatgaagtagattcacattgttaggcaaacattaccatcatccagctccagaactttttcatcttcccaaactgaaactcccaatccattaagcaataactgcctgttctccctgcccctcatgaccgctgttgcttctgtctctgtgaagttgacaactctagcacctcatgtaagtggagttagacagtatttgtccttttgtgtctggcttacttcactcagcatagttcttctgggttcgtccgtgttgcagcatgtgtctgaatttccttctttttaaagacataataaacattaattgcacgaatatgccatatttcatttgcccatttgtatgtctgtggaaatttaggtggtttctgcactttgttttttgttttttttgagacagagtctcactcttgcccaggctggagtgcagtggtgcaatctcagctcactgcaacctccacctcctgggttcaggtaattctcctgcctcagcctcccgagtagctgggattataggcatgcaccaccacatccacctaaattttttgtatttttagtggagacaaggtttcaccacatgggccaggctgggattacaggcgtgagccactgcacacggccaggtttctgcattttggctattatgaatggtattcataatattcataataatgataatgaatattattaataatgctataatgaacatcggtatacagatatatgttacagaccttgctttcacttgtctgctgtgtatacccagaagtgaaatcactgaatcatggtaattccatgcttaattttttgagtagcctccatcctgttttctataacagctcttccatttccaccagcaagacaagggggttccaatttgtcctcattcgtatgaacactttttttttttttaaataatagccatcctaatgtgtgtgaagtagtatctcactgtggtttttgattttcatttccctaacgactagtgatgttgacctgttagtacttttacaacttgatatttactcttctcatgttaaaagttacagattcaagtgcacagtagtcatttagtgaggttttgctaaatttcatccagtattccaagtacttgacatattaatttaatcgtgtcatttgtcagtttttacaggtgaggaagttcaggcacagagaagttaggtaactgacccaaggttatactggtagtaaattcctgagccaggattcaaatccagtctgtctttttttcttttttttcaagacaacatcttgctctgtcacccaggctggagtgcagtggaacgatcacagcctacactccagccttggcctcctgggcttaagcaatcctccagtctgctgagcagctgggactacaagcgtgagctaccgcacccagccctgtctttctttgagactagaattttaaccttttagttatattacacgtagagctgctgcaaacttcttgtacatcccacgcacctgtacagttatttctttaattctaagatgtgcagttactgttcaaagagatgaacaattttaaggctttctatgtatgtgccaaattgccttccagaaaaggttgcttcaattgcacatactataccagcagtatataatatacccatttctctactaacataccattcctaagtgtttcctttttttggagtcagggtctcactctgtcacccaaggctagagtggagttgcacgatcctagctcactgtagccttgaactcctagacttaagcaatcttcttaccttagcttcctaagtagctaggagtacaggcgtgcgccaccatgctggggtttggttgttttgtttgtttcttccttaaatggaggaggtctctatgttgcccaggctggtcttgaactcctgggctcaagtgatcctcctgcctcatcctcgcagagtgctgggattacaggtgtgaggtgggattaccatgcctggccttgtgtttttcttaaggaaatgtaaaagatactgattctttgtcataacatgtttttacaaatatttttccaagtttgacattttcttttagttttgtctattgtatttttttgcctcattaaagtttcatctttcactaacgtttgtgtagtcatgtctgtcttctcatttgtggtgtgtctttggtattatatctggaatattaaaaatgatttacatagttacatgcacagatcttacgtatacagttcagtgagttttgacaaatgcttatacatatctagcatagaccccgttgagttatagacatttctgtcaccctgtgaagttcccttgtagtttttctagtcttttttccctgactcaggtaaccactgttctgatttctatccccatagattaattttgcctgatttagaatttcaggaagaaaaggaattgtataccctcttacacgctttcttcactcagagcaatgcctgtgagattcatccaggtcatcttgtgtgtcattagttctttttatttctggggagtagtgctttgtttggatatatccatttgtttatccatttttctgtaggtgactttggggttgttgccagtttggggctattacaaatacagctgctaggaatttgattggcatctcactggatccatggatcaaattgcagataattgacatcttaacagtccatgaacatgatgcatctcttcatttatttaggtcttctttgatttcagcaaagtcttacagcttttagtgtagagatcttgcacatcttttgttaaatttatctaagtgttttatgtatcttaacgctgtttaaataccagtgtccttgccttttccagtatgtttattgctagtattagacatttttgtatgtttgtatattgacagtgtgccctgcgtatttgctaaattcacttaatttagtaggttttaaaatagatttcttaagatatctcttaggaatatcaaatagaatcatctacaagtagagatggctttacttactattttccaaacttacaccttgtgtttctttttctttccttaatgcacttactagaacctccaataccatgtggaatagaagtgatgggaagatagcttcgtcttattcctaatcttaggcaagaaacattcaacctgggaatttatttttataataagagaagaatccagtttttgtcccaaatggctagccagtgatccccagaactctttattgaataattcaaccttttcccactaatttgaaatgatacctttagtacatatttaattcttacatatacttgtgtctgacttatatcaaaatatttcctttaattcaacactttggtaaatagaagtataatggaaattagaagccttagtgagacgtcagtatgcttccaggcttttaaggtaagcacctaataagtgctttctaaagtgtgggaggggcctccagagaaaggggaggagatggaatgtcagacagctgaccaccccctgatatgctgctctttcaaggagctcagtctgagaagggtcatttatctccagaaaagaagctctattagctgaccacggttgttacaaacagacagatgagatggaccaatcgtagtctcccaaggcataaggtgtcctagtggaaggatcctggggaggtagaagaggacggggctcctctgagctgcattttggggctgttgagatgagcattgctgtctgtttgattctccaggcaaaggccaggatggaattggtagcaaggcagagaagactctgggtgactttgcagcagagtatgccaagtccaacagaagtacgtgcaaggggtgtatggagaagatagaaaaggtaagatcttgggggcccagatccctgaactttatggattgcttgcaatgatgttattggctatctcaagagaaaagaagaaatgggggctttagggtgctagctcaacgtaagtgattaaaaataaagtgaagacattagtattgaccagatacgtcagtgacttccagacaggtctggtcctccttatcacggtccagttctcatgtatgtatgcatctgctcttggaaaatgttaacaaaaggagtctcttttggacccagcagtggctggggagagactgtttgtctgtgttttatggtagaattaggtataaggagtgtgtttaccctgttatgagcctccagccttctgtttaatcaaaggaacttcattaaccaggctttcccaccagttctagcccttgaaggctgacagccagtcagagaaaatggatggacacacaggtagaagggaaggcttgtgccccgcagccttctcacccttctctaatgtgacatgcacatattaattgattcatttaaggcattaattgaaagtctctgcctcccggaggtattgtacagaaaactgaggtgagccaatgggtatttagaaaagaaaaacatggaattgctgtatcttctccagctaccttcaaccaccaaaaatttaaggcaaacattaagatcctctttacctcaaggggaatgccggatggtatgtgctgctgggttactggttttatgtaatgccaggaacccctcctgctgcattctctggattgagcctcccaggcctggaactctcctgggaatatcaggcctggggactggggacctgggcaggctggcaggactggattcttgcctgtgggtttattactccttagggggtgtcatctgtaaagagactaaggaggccataggagggtgggagtggacagaaagtccctgctagtacaaaagtgctgcattgggggctgggcacggtggggtggtaggctgaggcaggagtattgcttgagtccaggagttctggaccagcccgggcaacatagtgagacctcatctctgcaaaaaaattagccaggcaaggccgaggtaggagggtcacttaagcctgggaggcagaagttgcagtgagctcagatcaagtcactgcactccagcctaggcaacaaagcaagaccctgtctcaaaaaaaaaaaaaaaaaaagtgctgcattggaagcccacgcaggtgtgcaaggctctagctctgcccagcacaccataccatgtgtttttatgcctgccccaggtcagcagaaacatcttaaggggaatgttagcaattcttcacatgtccaggcaggtaggtaggttgccagccatttggaatttaaggaaccctgagtcttgagggtgggtaacacacaatccttgatgacctgagagagctaaacctctcaaaagctcatgagtcttcaagttggcgggcaggccttggcttggaccctcagctcctcactggctggagcacaggctgcccgtatcatgttcactatccttgcttgtcgctcccttggtaccacatatggtttttcctgcagggccaggtgcgcctgtccaagaagatggtggacccggagaagccacagctaggcatgattgaccgctggtaccatccaggctgctttgtcaagaacagggaggagctgggtttccggcccgagtacagtgcgagtcagctcaagggcttcagcctccttgctacagaggataaagaagccctgaagaagcagctcccaggagtcaagagtgaagggtgggtggagcactgcggggttgccctgggggttcagtgaggggttcaagggaggcccaaaggccctacaggttccataccactcctctgtttcccttcgctgactgtcagtaagccagggagatgcaaactgaggaatggtgacagcagagatgtgggggcaaaggacagggtagggaaagacagccaggggttcccatggcctctgctgagagccctctcccctgtgagacctgcttcctggtggtctattccccttccaacatctgagctccatggacaggctaactacactttcccaccacaaccctttagatacttaaaagaccaccttccttccctgggtatttgttgtgcctgggttgatcactattcggaacaatgctgggagaatggtgaccatttttagttaggggatgggcagtggataattttcctggcttagagttgagaatgataagggttttgcatggtgttaaaatttagaatgggaaggaccatcagtgactgtcttgaatccatggacacctcttggtctctccagtttaccctctgctggtccctcagcctcagtctggagaactgcttgttaacaagcacaccaggggtggtgtggcagagcctggtatgcaccctgctccttgaacggtgactgggcaaccatcaagcagccatcacacattatctcagttcataacgcctgttcattgcagcagcacatggggctctagaatgtggaagaaaactgaaaaatcaggccatgggtcaaaaaggccacagggcattgcagcatgtgatataggtgttggagttcatcagctcccacttatgccatgataactgccagaatgtgttgagcacatttcgtatgccagacactatatgaagccctgtatttggactgtttcatttgcccatcaccagagttctgtgaggcagatggtattcttttccctattttatggatgaggaaagtgcaagggtttgtgctcaggtctatgtgatagctgagactgacagaccactgcggctgtcctgcgcctgtattttgggggcaggtgatagcctcagagctgtgtttgctgagccagctggggcaggctggttagcactgctttgactgtcacttcttgtcagggctttatatggcagtacagccccacctctgtgagcagcctctttcccttgctctgtgttttagctcaaaaggcctagctccctggacttgtgctttgtctttctgcaatccctaccccctagccatgggcttacctctagcctagtcccggctagaaccttccaggccaggagatacatgggtttcttttttttttttaacctcagacggggtctgagccctggattcttgtaatgggttgttctgagtccctggaacaaccctagcccctctccctggctgggagagtatgttctgaattggatggtgtcttctgccatcttggctgcaagtactccctgagtagacagtgatcgcctaagggcactgagtggggcaggggttagggagtgacaagtgtgagtaggccctacagggagttgatagaatgacattaagatactgcatcaccgcaagtcattgggtgtcagacttttaatggctctggctgtctctcatatcctgtgtctccttcagaaagagaaaaggcgatgaggtggatggagtggatgaagtggcgaagaagaaatctaaaaaagaaaaagacaaggatagtaagcttgaaaaagccctaaaggtgagttctcagctctgtgtctcctttcgacattctgctgtctggattctctttctcattctgggaagacaattcaaggagttgtgtcccacttattaagacctttagcaaattgatggcagttattaaatagcatggcttttccccagattctttttcctcctccaaaagaaaccatttttatttggaagagaatccacattaggctgtaggtgtctgacctgcagccaggcttgagcaagggctgagtgctctgtttccgctcaccagcctcatactgggatgacagagattcatgctttggccaaattatgcacaactgtacaccctgcacctttgtggtcacttgcaaactttggaaactgaatacttagaggatgccaaagattcttagcatagacaaatggcttgaagagatcaagtgtctccacattttttaaatgaagatcttcatttttaaaaaaggaatagactgataatgacagaagaaaactatccattaaatcagtggtccttgaccagaaagattcatccctgtgttgattatgtacatgttgaagcaaagcaaaaattattaatcagaaaatgctggatgtctgggaaattgagggagaacagttggtctctcttgagaacatgatttctatgaaccatctgcttgtgtctcttctatgagtattcagtttttactagtggtactaaaattaaaagcagtttctgatatggttctagttgctaaataagaatcacacattttgttcaattgtcttatggtaaaaaagtgtctgtcatgcaccaaaactggctgcaggagaactgtggtgccacttcacattggccatttggtgagattagtgtccttctctcttccctagtggtatcagagatgtatagagagtcagaaaattaaaatgcccctcagcgttcccactgtggcacatctgtgtctgttggctctccccccttggtcacccaggtgacattgttgtacttcttccatttaaccctgtatcactagaccttttcctcatcctctcatgtctccattcctggtgtcccagtgtatgctgtgtgtgatggagaggagatgtcgagagaccccttaaaaatgaagctgggaaacaggtgcagacgtgtgtgcctgtacctttgccagtggagttaaaatcctcttttgatactaatagcaaccctataggatatgatagggctggcatttttgtctccattttgcagaggtggaatctgagcagagatggcgaataacttgcccattttcctggggaaggaggagacttacctcagcctttaaaatggagaggctgatagcttcctcagcaagcttgattgttatgagaataaatgagatgaggccgggtgcagtggcttgagcacctgtaatcccagcactttggaaggccgaggcaggcggatcacttgaggccaggagtttgagactagcctggccaacatggtgaaacaccgtttctattaaaaatacaaaaattagctgggcgtggtggtgcacacctgtaatcccagctactcaggagactgaggcaggagaattgcttgaacccagaaggtggaggttgcagtgagctgagaccgcatcattgcactccagtctgggcaacagagtgagactccatctcaaagaaaaaataagttagaagacacgtaaaagcatccaaccaagagtaggcacttaataaagattaaaacttccattttcagaagagcttaaatacattcctgcatgatactgaatataatataccatcaaggaaattggtgtttgcgaatcattcctactctaagattggtggagaatggccataccctgcctcctctagttgctgataaacgtgggccgtgggctcagcctagcacctccaggctcttacctggtgtttctggggattgatttctgagggttggttccaggagccttggtgcagtctcccccacacccttagggcttcctcatcaccttccacagtattctctgagagaccacacagcaggtttaatttggtgtccacaggagcatgactgggagtcaaatcctgtgctaatcacccagatttgcaggggcagctcgctggtgcacaagggtataactggaggctcagcatgaccagggctcctcctccagttggattcttcctttgaaaagagctagcctctcagccactgggtcttgtccataggctcagaacgacctgatctggaacatcaaggacgagctaaagaaagtgtgttcaactaatgacctgaaggagctactcatcttcaacaagcagcaagtgccttctggggagtcggcggtgagctgcctttgtgttaagtgggacacgcatgtgaggccgaccccgtcgttgtggagtgactgtcccaatggagtgtgggaggccctccgtgtgaacacctgctggtattaattgcaaggagtataaatcgtggttgtgttgcacggtcatcaccaccatcgtggtcaccatttttccggggtggatggggccggcattcacacgccccaccagacatcttccacatgttagtgcttgctctagagtgccaggcctgtgaagagaggagagccccctcctgaggggtggcatgatggtttcccatcagtgtccccagctggcccttctctgctgtcattcttgggagttggcttggcactgtactttctgcaatgccagtggttgctttcccttcatttctaaatcactgagggttgggggcgctgcaggaacacttggaaataaggtctcctacaagaatccaagctccattgtaaaccaagggtgggtggggtgttaagagccccatagcaagcccacagcaagaagcctctcttctttgtagtgagtggaatctgtgcaagttcctccatcccacattagtaagtgtccttttttgtagtcccgcatttgccctctgacatgtttctccactggctgcagatcttggaccgagtagctgatggcatggtgttcggtgccctccttccctgcgaggaatgctcgggtcagctggtcttcaagagcgatgcctattactgcactggggacgtcactgcctggaccaagtgtatggtcaagacacagacacccaaccggaaggagtgggtaaccccaaaggtaaggggtaggggaagatcctgggatctgttgggagaaaaacctggccccactttctgcgcttgtttatacttcaggtccctgagattgcagggccatgttcctcagacttctttacagctgcgtcatcctgtttaccagaatataaaattacatgtttgcaaactacgcaaatgtagaaccgaagctcctctaagtatggagtagaggtccatttggtgtaaaatgttgcttgcaaagaccatgaatagtttttatctattgaatgcctcctatgtgccaggcacagttctaggcttgagggacatatggtgaagaaatggatagtaattcctgctttctgatacaaggttttttcaaggacatttccttgccttagtgctagcaggagaattggatccagggttcacgtatctcctagtatcgcacgttctctctttttttaatggaactgcttatggaattctcaacgcaaaatacctccatggggagcctcctttggagccggctggtggggttctagcagtatctttgtggggctggctgctccgaggcctttgcctgtgctccctcagactcagcaggacccaggcccagcagcctgggtaggtgcagagctctgccactcaccaagctgcttccctcgctgttgcacttggaacagcggcacacagtacacactcaggaatcgttacctgagtaactatcgacattactcgctctacacctacaactgaactccatttccactggcccctggctcacttgttcactgccatgattgcatgatccctcctaattttctctctgtgcgtttgagtggttcctctaaaataaatctgaccttgtcacttcccccacccttaaaatcttagactgattccccgatttttctgggtatgcaaatcttacagacccttacgtggtatttgtatttcttttactatctttgatggggaaatagtaagatggcaataagcaatgtgccattccttgtattttatatatcaattgtagagcatctatatacatttttaaaggttatgtgcatgtgcgagacaagtttttggtctggcagtgcttgctgcccaggcagtgacactgttgcccccaggcacttgtcccacagaatcaaggccagctctgtagcttgtcctcagagccctctgtgatgcggctttgctggccttctgcagcctttttctgccacccttttcttccttctcacatacccctctccccaccccaccgccagtcttgctcattctttttaggagtacctagcaatagggcgcctagccagggcaccccacatgccaccgtgtgctactcagatggctgtgcttaggcagtcccctgtgttttcagctcccagtgggcttagcagatcactgcctccaagtgcatgctagcattccctgtctcacatcaccttggcacacctctggcatagcttagctcctttgttaaagttcaccttcctatagctgatgctcagtcacgaatgagatactttctgaagagcagaaactgtctttttaaccagactatggttggtagcacatattaggtggtctgtgtgtgtcggaagcaatctgtgacctcttgtatctaactgacatcctgaacacaggcatagctggaaagggcagtttcttgattggatgaagacctgggagcacagtatctttccctgagcttcatgtatttgatacttattgagtgaccatttagagcaaggccccttgtaaatcagtcagagtgaagagtgaattgtgctgatggaagaatttatagtgaataccatagggctccctgcattcatttttccttcttctaaaaaggaaagcaaatactgtgatttccttttgggtaataatctcccagtgtgtatatagtattcggggtcttggagttctggagtaggcatgtgatcccacagaggcctattaactctcgaagggagcaactcaggaatgaggccagggaggttgtagtcatacagcagttccagtggtggttccctgaccgaattggccactggtttctgtttttgttttttttagggaaagatttttctcttaaagcagccacaatattagccctattataaatgtaaaagtaccggaaataagtactgtagcagcaataatactgtctttcatccttaaagcctcacatttttctattttttgttactctttattgtaagaagaaaaaaagagattatttgatttggacaagccaaatcctctttggtctatggggtggttacctcaagggagagctggcttcttaactaaaacttaatattttttaggaattccgagaaatctcttacctcaagaaattgaaggttaaaaaacaggaccgtatattccccccagaaaccagcgcctccgtggcggccacgcctccgccctccacagcctcggctcctgctgctgtgaactcctctgcttcagcaggtacagcatttgggaccccggtcttagagctgctttgcaggaattgtttgcccactacttgctggtggtgtggagctggtgaagaaagtatccgtcaagggtctctctttgctgaccccaccatggggaagccttgccctgcaggggataggcctcttctcttggcttgttacacccctgaccacagcaaggtgggagagtgttaagaacatagcatcggctgggagcagtgactcacacctgtaatcccagcactttaggaagctgaggcaaaagaattgctgaggccaggagtttgagaccaacctgggcaatgtagtgagaccccatctctacaaaaatgtttaaaattaatccgagtatgtgcctttagccctagatactcaggaggctgaggcggaggatcccttgagcctgggaggtcaaggctgcactgagctatgatcacgctaatgcacaccagcttgggcgatggagtgataccctatctctaaaaataaaataaacattgtagaagaacaagcagctcttactctgggaggctaggagaggggctcctaagaaaggctaggtcgacagccttacctggagttgggcgcagggtctcctgcctgactgcactgcagaggagcatcccaggcctcactctccaggctgccctgcgcccaccagtcatccgggccctggtgtgatgctcaagtctctgttgtatgcagagggagttactaatcagcactagtgagaaatgccccaagccaaccaagacagtgagagcaacgtatttttttggcaggagaagtgacccgctgcttgtttactcagagacatgtggcatagtctattggtgaaggtcacagtttggtgggtggaggatgagggttccttccttgaacataaacctgttattgacttccttttcatatcctgagaggggaccagtggtcactgcagtgtgtgctggtggtcatcccgagtccactgtgctgctggcagcctgggtccaggtgcccacatgaagggccagttgggggctggcattctgacccctccatggagggttccctcctctgctttcccctgacttgcagttcagcatgagtcaataattttgttctctggagacctcagcagtttcagttaaactgtcagtgtttcctagttgtttgccctcacagggaaggcaggaaggacttttccttgcagctactccagttctggacgggtgtcacctgcactgtgttgtttgctgtgaacagaaggcacacccctgtccaggcctttctggcctgggtcagtgcacaccaggctgctgcttttctcctagaatcagttagctcagctccgtgtgattgtgctggccactgctttgagggactatcatggacatgtctcattttaaaatggggttaattcataagaattgcagtttgtttgggagaataacagaaggaattgggggttcatgtgaccttacccctcttcccatccgactccagcctcctggtccctcgtccgcagatgcagccttcctagcctgaccttggcgcggacctggggtaacccgcagctgcctggctcacgccgcgaggctggcctggccatggagtggcattttgtggcttgctccctgcccagtcctttctgtgctgagggacatctgtaggtactcaggtggcagcttgctgtcccgtcctgttttctcgcgagtgtattttcataggcttttcccaggagctcgctgcttggctcacctgctcctccacctccccttactggggagcagcaccagagctggccttgctgaatgattctctcctttcatcccagataagccattatccaacatgaagatcctgactctcgggaagctgtcccggaacaaggatgaagtgaaggccatgattgagaaactcggggggaagttgacggggacggccaacaaggcttccctgtgcatcagcaccaaaagtgagttgaatctgaatttgtgcaacagggacaatgcttctgtatcttatgattgtgatgacgagtaagtgaggaagagtcgaacacagcgctgaaaaactggatcttaacatcatcatcgctgtggttctttatgaagggaaaccagtatttgctctcagtgttgctgctttgtactgtagattcacatgcattgcgtgttctcaactaaagacggtaagctactataggttgagtctccctagtcccgaagcccaaacaaattgcctcaaaattcaacactttttgagtgacaacatgatgctcaaaggaaatgttcattggagcatttcagatttcagagttttggattagatgctcagtcagtaaatatgaagcaagtattttaaggtctgaaaggtttctggtctcaagcatctcggataagggaagctgctcaacctgtattctcatcacttcgcactgctctgtaagatgtgcatagatatctgccaaaacagaagttcaaggttcaagtatgtttggaaaaggtagggtaaaacaaagctaaacaggtttctgtgtgggtttattatgctgattaccactgtaggtcttcaggaaccagagaaatagaatacaggatttcccatacatatttgacatcagggtgttttttctttggagtgtttgttaacatcgtgctgtagaatggtttggagaaggctgccctggctcatcataccttagaaaagggggaatgttgctgataaaaacactcttgggagcattagacttggaagcaaaggagagctgtgaatgctgagggtttggaagtacacactaaatataactgtagtaatttgaagtttcagttttgttttaaacttgtattttggttttttttcctttcaatttgaacagaggaggtggaaaagatgaataagaagatggaggaagtaaaggaagccaacatccgagttgtgtctgaggacttcctccaggacgtctccgcctccaccaagagccttcaggagttgttcttagcgcacatcttgtccccttggggggcagaggtgaaggcagagcctgttgaagttgtggccccaagagggaagtcaggggctgcgctctccaaaaaaagcaagggccaggtcaaggaggaaggtgagggccccaagctgccccctccagggccaaaagccagggacattggtggccaggttgttgtccacggaacctctccctttgtgtccctgacatggcctgttgagtgctgcagagcaggacacagaatggcaggcgctttggggtggcgggagtagtgtgtatatagatgccgagttgacagatgatgggaatgagaacaactcatttgccttctaccttccccttactttttagttacatttaacttcatgtttacatttttctgttctcctccaaggtatcaacaaatctgaaaagagaatgaaattaactcttaaaggaggagcagctgtggatcctgattctggtaagcaaacaggactgccagcaaagtgggctgtgccgccccccaacccccagctgactaggagcacacatccaaatgcccgcagcatacctggggcagtgtggtcgtgcctttgtcctcactcaggcctccttcaccagctcccccagtcctgagaacacacatttgtggggagcctcccgagggtggtggtagtgtatccaagaggcgtgaacctcaggcctgcagatcccttctccgtgagagtgctagcacctcaaggggagagaaaactgtaggtgcttttcctctgggacaggactggaacactctgcgcatgtcctggagaaaggtgggaaggtcttcagtgccacccttggcctggtggacatcgttaaaggaaccaactcctactacaagctgcagcttctggaggacgacaaggaaaacaggtgagttctgcaggtgtagcctggttgtgcagagacatgggcccgtcctgcattggttagtgctgtgccatcagccttgtgaaacccgttaggcccagtgcctggggaatgaaatctaatcacagagatcaaaaacaaattataaggcctttgcttaaaggggagaaagaagccacttactaaccagtagcgttgctgtccttgtacagttgtcccaaggtatggtttcacatattcttctgctggcttttctttttgtttggtgttttgttttttgttgttgttttgcaactatttgttttgttttttgaaatagtctcgctctgttacccaggctggagtgcagtggcgtaatcacagctcagcggagccttgacctcccaggctcaagcaatcctcccacctcagcctcctgagtaactgggactataggtgcgcaccaccatgccttattttttatggagacgggcctcgctgtgttgcccagactggtctcaaactcctggactcaagtgatcctcccgcctcagcctctcaaagtgctgggattacaggcatgagcctctgcacccagccccagctggcttttctttcagctacttgaatcaagattttctgattttacatatgttttaaaactttgaagcaaataaaggttggcaagcgttgaacttactctttaatgttcaaactccctagtaactaaagaggttggatttgcctttttttttttttaacatggtgagacaggcaaggttggagtgtggatggtggggtacagcagctgggaggtggtgagaggttgggctggcttttgtccttatgtttctaggcagagtggtccttatctagtgagttcattgcccctcagtacagccaccacaaaatagcatttatgtgtcagtgtaaaggcatgtggaaggaactcttactaaattctaacgttgattgtggatgtggacatttttctggtggcttagatttcctggtgttaagtgaaagggtggtgtaggctgttagggtcagaaaaaattttcaacgtagatcaaggtagtgcttctcaaaaattttcacaggaaaaaccaagcagagaatgaatttttatacccctgttcagtagcccagagaatggccagggagtcccaaattttctttgaaatctgtagttctatctttaaaatgtacacaaatcttgtatgtgggtttatgatatatatatatttattatgaaatgacaattaagtgttgcattacctctgctttgagttaatcaaaaattagctcatccaaagctgagcagcacagcagctgggtgtgtgtgatgtgtaccctcaattgagatggaatttgaacatgacagcctgcatctctaggtcaccggacctgaggagccattgccactgcccccctcatttcatcatgtcttggccttggatctgagttgaaagtttcattatttttagggtacagctgtaagggttgactccttgaacacatgacttccagatagtactttgtatttctttggggagaggactagaatcatttttatgcaaaggtctccagactccaggattcagtcctcaggcttggctgccagaaccaagtttaaactattctttggcattttttgtagtcaatatgatttgaaagtttaatgaaaagtaaaataaagaccctttattgttatagcagttgtgtttgttctgtgttaatcaccatccttttggggtgtgtaaaattcttccccacgtgaatgtaatggcaggaaaggggagctcctgaaatgggacagctgacccacacatgtgtatctgacaccctccttcccactgcaggtattggatattcaggtcctggggccgtgtgggtacggtgatcggtagcaacaaactggaacagatgccgtccaaggaggatgccattgagcacttcatgaaattatatgaagaaaaaaccgggaacgcttggcactccaaaaatttcacgaagtatcccaaaaagttctaccccctggagattgactatggccaggtaaccacataatgcccttacactgtctgcttctaggaaaaggaagggacaccttattctagaaaatccacatcgtggatcaggtggcatcatagtaaacatactaccaaatgttgaaaggagaataatagtccttcacaaattctcccccaaaaatagaagaaaatacttcccagctcattgcatgaaggccagtaccaccctgataccagagccaaagcagcacaggagaactacagagcagtttcctgtgaatagacatgcagaaaccctatgaatagagatacaaaatcctaacaaaccgaatccagcagcatagacggatctatacaccactcccaagtgggatttatcccaggaatgtaaggttggttcgacatttaaaaatcaatgtaatatatgaatagaatggaggacaaaaaccacatgatcatctcagtagatggcagaaaaagcatttaatacagtcaacaccttgaagtatgagatagagcttaaatgagaattgtggtagcatctttgagatatcgaggaggaacagtcttttcagttactcctgaaacaataggacgtaattcagagattccagataaggctttttatctgaacccatggtcacccttgatcatgtgactggtctgtcatgacagaattatagtaacttgacctgctctgctaggtcacactttattagtcccaaattatttcctagtgctgtctctgtagttttgggcgtctccttacatctgttagcacacagcattcatttgtctattggttgacatttttaacttttctgttttgtcttttttctttgcaaaatgcttgcctttttaaaaatgaaaatttatcacttttttaatcagataaaagaaaacatttattttacaaaaagatctgtaggtgggtagagattttaattctaaatctttgaggcctagcatgtctcgtagggggaattctttagtttacagagggcctcatgaactctccatattaaaaataggatttacatcttgcttatacaatgatgaggctcagacagtagactttcaggacagatttggcctgactcggtagcgccccttactgagttaaatactttaaaaatttttgagaaatattaatactaaggcacaaaaaactaagattgcccggaattaaccacagttaaagtaatggtagatatctttttcagtcagctttcactgcatatgtacgtttcccaccaccatatgtaccatgttacaaccatctgctttttgccctaatgtaccaggagcatttccttatgtcttctagagcagtgctgtccaatagaattataattcaagccatttcaatacatttaaagttttttatagccacattttaaaaagcaagaagccaatgaaattaatcttggcattatttaaccccgtatatccaaaatattctaatttcaacacctgatcaataccaataaaattattaatgagaaaatttcccttttagttttttctctactaagtctttgaaatctggtgtatattttgcacctacagcacacctcagtttggccagtggctactgtattggccactggctgcaccagtccagagcattatttaaggctgcattgaatcccgtcctgtgcgtgggctggaatttatcattaatcagaacagcttcctgcctcctgttagtcatttagattgattctgggcatttactgtaatgatgctgatatacatttaaatatttgtgtgcctctgtgattgttgtcattacaagtaggtactgggtcataaggtagatgcacttaaataggggttttgaacacatagatactttgccctccaatgaagttacacccagaagataacagagtacatttaagatggtgtttcaacactgagagtaggtctactatgaaggtgacagcagcagccatgaacactaacaacgcaagttagctcttgggtaagccagtctgattccaggttcaaagcccagtgccaattcctttcactccaaataccaaattccgttttagttgctagggacactgtgctggacagagcaccgtctataccctcatacagttcaagtctaaagagttaaagcagtttcagtacagtgtgatcttgatataacctgggttcttcagacagtggggggtggagtctcaatagtctattaggcagcttaggaagaggacggacagctaatgctacgatgtgctttaacactgtcagcctggctggcagcgcatgggactggttgcttggtactttgggaatttagagaaggctatataaacttagtcttgcaactggcccttgtgtgaggaagtgtaagagaaaagagaaggaatttgtccatcagtttcatgtcccattgctccaaagtttgcttctacagctgcccagcacttccaggttgggcatgagtgggcactagacaggttcccaggcagggaccagcaaccccagggtgggtcagcccatgcagacgctgcagtggcaactagaataagaatctggagcagccaagagaacttcagggcaggcacaggaagagtctgacccatgtgcagcatcaggcacactcatcctggccactgttttccacacctttttgattaacactcagctttttttgctggtggcactctagcctgtgtcctttgtctgcagtccagccccacagacgcagataccttgcttgagttgttgatttgggtctcttagcaatgtgcttttttcctgaaggatgaagaggcagtgaagaagctgacagtaaatcctggcaccaagtccaagctccccaagccagttcaggacctcatcaagatgatctttgatgtggaaagtatgaagaaagccatggtggagtatgaggttattgcgctttatcattttatctgtgagcatttgctgtggatgattatttgctgagctagtgaagagctgtctgcctgttcttgtttctgtttcaaaaacaatacattggctgtcagcttcttgtacctgtccttcaatcttaaattgtgtgagtgttggggcctggagtggttgcacttttgcagagggttgtttgatttgcagtgaagcatgtgttgtgttggagagagttgttcctggtccctagtcccctttgtactttttttctgagacagagtctcaccatgttgttgcccaagctggtctccaactgctgagctcaagtgatccacccacctcagtctccccaaatgctaggaatataggtgtgagccatcgtgcccggcccaccctttgtatttttccccttcttcatgctgtggcaaggtgtattagccatgcttcctttgtggcccaaccaaaccaaccaactggagttaccatgggaagtgcaagatagcccacttagagtaaaagaaaattgctgtgacgcttgattcgtaagataaaattcataccagtttttaaaaggttggcagtggggtgggggtggtggttgctggattagtcatgcttctgtccagggcagaatggcagagactgcaggcagaggctccgtgtttcctgtctgttctccttctcatctccgctctccgcccgggagatgagtgcaaaagggcggcccccttgttcttgctgctcctagcatcagagctcttaagtactgaccctgggggccttcagagcagaggtggtcccacctggccagcaaacaccctctcctctctaccctagctgctgaacccagaagcttcaggctgctctgaaaaacaagcagctgtgatgcatttggttattccctttgttctaggctcctaggaaccagtggaggttaagagtctcagatcagccttaagcattccacccttctccatggggttgctcccttcacgctcacgttctgctgtcttcccaagtccttcctcctagaacctcctggcctgccttagagctgggaggacagggggtcaaaactgggcagtataaaccactggcagcctaagccgcatggacatcagggccaaccccgtatctccctgccaagagctcagcctggcaggaatgctcacgcctgtgctgttgtagagtggagtgttgagttacatcctctaacgggtttaaaaaatggccagggcttgttcgctgtgcttgttgaaatcgctgtgtgatctgacttttgtttatgaggtcactagtgtgaacaacttatgggtgggctcactgagaatgagggacggaggtggagggaaaggttgagaggtgctacggtaagggagaagaggggctcgtttcattcacgttttgaagtcctgcacttcatttccagtctcccacaccttggtctatctgtgattcatagacgttctcagctattctcaaacccaagtcctttcctgtgaaatgttgtttttgttgttgttttgtgtttggtttggtttggtttggtttgagacggagtttcactctcttcgcctgggctggagtgcaatgcacgatctcggctcattgtaacctctgcctcctgggttcaagcgattctcctgcctcagcctcccgagtagctgggactacaggcgtgcacgactgtgcctggctaattgtttttttatttttagtagagatggggtttcaccattttggccaggctggtcttgaactcctaacctcagatgatccacctgcctcagcctcccaaagtgctgggattacaggcatgagccatggcccccagcctgaaatgacattttaatgtttttcactggacaggtaactagtttagcaggaagaaaagggacaggggcgctgcttgctgaaacaagctaaaaggcagctagctggaagtgtgtggaaagcggggtgcccactcctgacctcagcggggtccacgtgggattggggtaaccatgtggagaagtagacacagtggccctcggggcttcatccccagcaccaggggaacctgactctccctgtgaggagggcacatcctgagtccagaagggaatgggttccgggcagtcacgacacatggcagggggcagggttccaggctgcagccctagaagcctcctcctggctgcagctggggctcgtgggtccccagtgccaaggtgtttctcccacttttctgtttctctctcaactgggcagctgtggagccactgctcccagcccgctgtccagcgctgtgcctgagtttcttttccagtagtgagggcggcctgtgtggatggagcccacctcttatttttagtctgtgcgtatgttttgaggggtgtacaattagggaaactaggtattttcttttttttacataaacaccagaattatacagcgtggaaaatgtcgcgcccttcagagctctgccctcactctggccatgctctgccgtcagaacttcttttgggattccttcttgagaattgctttcagagctgattgagggtccataccaaagtcactctgttcttttattgtaccttgttcttggcttgaaatagattatccaccttcttccccagatgtggctccggctacttaattcttgccagaaatcagatcttcccttaggatggagtttgcagtgttgagggtacagggaagcccatgccagggcttgtggatgttattagaagctgttggctcctggtaggtgtctgatgagctgtgagcacttttcacatccttttatttaattttatcaccatagcagttccatttctaagattcttgttcagttctttgttccaagcactgcaggaagtgctggacatgcagaaatggaaaggcgcagtcacggcccccagggagctcagaagggtctattggcaaagccccagagacgatgtctcaggatacagagtgtggggcccattggtacacaggtgtctccacgcaggggctgagccaaataggcagggctgctcgcaaaagggagtgagtgccttttaaggaaggtggccccacttaacaaatggaaaatgaaggctgcagatctcatgcttcttccactgcagcttctcttgatggcaggcagttcccaagatatgagcagtagcaatatttgttggaggtgactgatctgaaagggacagcattgatttgaatgtaagtccataagttcaggagtgtgtcctttttaaaaatagtgttcaacacttgaaaactcttggttcttttccaggtgggaacccaggggtgcacttaactaactgccttggctctgggaccccagggaaggccgctgggtggggtggtcagcatgatttatgagccctcatctgcacatcagaattggatgggaattatgctatatcttcgtccagacgtgctggactgtttgaaactgggcataggggcagaggagacatggttggctaagcccagccgtaaaggaagtgagcaagaatcttcagacacactgccatccctcatggtggggtggggctacagactctggatttgggtcactggtgtcctcaggaaatcccagcaggctcctgactgctcctgttgggggcctgagggtgggctgcccggtccagctctcctgcgatcacactgcacagtgcccagctttcagagcgaaatcccctgtctcctcagatcgaccttcagaagatgcccttggggaagctgagcaaaaggcagatccaggccgcatactccatcctcagtgaggtccagcaggtaagcacagggctaccaggggcctcctggaaccctcctctggccgacttagggggtgagacctgggggtggcaggggtaacatttactcaaggttaagaaactggaagtactgaactgcacttcacgagggtttcgatttttttcagttcaataaatgacaagtgcctgctacttacaaaagtttatcacaaaactaatgaagagcaacatttttcagttgtcagatacttagtaaactgaccataaacttgaagacgttggttaccctctctgttaaaagtgaagtcatccctctgtatcctcggggattggttccaggactccctcggggttactaaaattcactcatgctcaagtcctagagtgccctgcagaacccatggaggagaaaagttggccctgcacatctgtgggtctcgcatcctgagattttttttttttttttttggtgggatttttctttctttttcttttttgagacagagtcttgctctgtcccccaggctggagtgcagtgtcacaatctcagctcactgcaacctccatccccaggttcaagcggttctcgtgcctcagactcccaagtagctggggttgcaagcatgggccaccacacccggctaatttttttgtatttttagtagaggtggggtttcactatgttggccagactggtctcaaactcctgggttcaagtgatccgcctgcctcagcctcccaaagtgctgggattacaggcatgagccaccacacctggcctgagaatactatattttttatctgagtttggttgaattctcaactgcagagcccacaggtgtagagagctaactgtatttattgaaaacatctgtgtataagtggacccgcatacttcaaatcgattgttcaagggtcacctgtgttgtggtttttattttatgtgtccttaagagttaggcagagtttattttgcagttactaggaagtcatcaaatggaagcctctttcattcatgttatttcaacattctttgagcatctttcaaggtctaccagtcccggagccttccagctacatcctggaggggctggagggttccgcttatatttgtgggtgggtgcaggcctggcctgtagaaagaaggaaagcacacaggaagcagaagtgggcccaggcagcgggctttctggctggtgctggagaaaaggcgctgaaccggatctgtcaacttcagttacagctggctctgagcagtgaacctctctccttgttccttactgactgagaacttacaaggctttcctcggccccagcttcttcccatgcaatagtcttcaggaagaagagctggaatagcatccttacccattgccagagccacctgggcagcacagatggaagttgtacaacttggtgaagtccatgtcacagcgagaagcaggcgtggggcttcggacctgctgggtgccacttcatattcccttgaccttcctgtggtcacctaggctgtctgcgaaattcctggaatcccagtggccccgctcttccatctctgtgcattttttgtgcaccctttgcatatagagcaccaagtgacactggcagtgagtgtaaggattgcttagcctttctgtgcctggccacctcaacctccaggtacagtaaaaactaattccaatgaaggtcagtggaggcagggagcctgactgaattttatagcgatgggcaacctcctcccaacattttattatgaaaatgtttcaaacatacaaaaagttgaaggaattttacagcaatagtcattagcccaccacctagattttacagttaacattttgcatagttgtggcggggtttcaaatgtctgtaactgcacagttctttgtacaaatgaaacttcatgggagaagcccatcacgtgttgagcagtgcttttagaggatgggggtcctgccctgctctttaacaggaagatggtcttctggtcgtttcccatgtgtcctggcatgtgcacataccacgctacttctggacctgctgcagcacccacctgctaaaagagaaagcctggccgggggcttggagctgctccctcagtcttgcattccttctgtcccctcctctccaggcggtgtctcagggcagcagcgactctcagatcctggatctctcaaatcgcttttacaccctgatcccccacgactttgggatgaagaagcctccgctcctgaacaatgcagacagtgtgcaggtagcgcaagggttcagaagggactgcaggtctgctgggctggggtgtgactaccttgcagccgtccctccccatcatgatccctgagggcagcaccaatgctgggagggccaccctcttgcccttgttttgaagttgggtttctacccacattgatggaggcagagctgtttttcctgcccctgttctaccaaatccactggggaaagagctgttggagagggacagcctctccctcataacagcatcttcctccccattttccctccctgccttttaagacagctcctggctcaggacccatttgtctaaagtaccttcactgtaggtcccaaatgtcagcatgtacgagaggaaagacagttcttccacctctcaactcccccaggccacaaggccttgttaacattccagaaagtccttatgagctctcaatatgtgcagcaggtaacaggctggccctgaccagcaggagggtttgccattcactgtgttggaccttctctgcatgtaggttttctctgccacctgggtgagtctgtctcattcaccatgatacctaagtcgggggctttcttttgctcctccaggccaaggtggaaatgcttgacaacctgctggacatcgaggtggcctacagtctgctcaggggagggtctgatgatagcagcaaggatcccatcgatgtcaactatgagaagctcaaaactgacattaaggtaacagggtcaggccttcctcaagcatcttaacctctcatcctgagagcagcggtcccaaacttccatgtgtgttaggatctcctggaaagcttgttaaaacacaggtggctggcgcccaataattcacttttctaacaagttcccggacattgctgctggtggtcctttgagaacctttgggcgtttcacgtgtagataatgcaccttgtttgcaaggcagccttccaagccagcacctcagcttggcgtacaaatttatttttgagggtcttaccaaaagttcttttttgtttgtttgtttgtttgtttcctctccttaatctagagaggagctctgtttttctaaacccttgtagcgtgaacttttagaagacttattaccggtgtccatttcagaagtggaaatgcttgatggcacctgtaataaaaacacaatgcttgcgttcatttttctctggtgctgaagtggactgtgttggcacacacagtctctgaacaccccgcttagaccaactagaggagggatttttgcctcagcttctagatggcccggtccttgagcctatctccacactcatgtgccccattgtcctcagcccattccctgcagtgttgcaggggtttgggtgggcgagagtatgttgagtctggtaccaggtgtttacatcgctaaagaaagagccttggcttctttcctaggacaaagtatagacctatgggtccaagcagggtaagacaccacatgtcatttgttttgcccctagagcaccttcctgatgggaaaactgtaggtgtggttcttcgtgaagggattcttattctctttttacaattctgaagccttttaattaaaagacagggaggtagaccagcattctaggttttctgaagtttgaatataaatatgaaaataaaacataactagtctcctccgtaatactcaggcttactgagcatagattacatcagctatttgacagatgcttgttaggcctgtgctctgagccagggataattttcattgcacatcatagctgtgacttcctctggcccattgtgttttaactcatgctgagctggactctcttccaggagccaattgcttgttctggagatgccctgttcactgacagtgaatcccacattctagcttccctgatatcccaaaacatagaattttaagacaaaaaggaaccctgagattctctagcagcccaagtagatgaagaggtggaggcttaggtaagtggagccactggcccaggatctgcccagcccacaggcctgggacacaggctctcggtcatgcccggcttcctttgaggagtgtggtgttgagctatgcattgactgagcctgagcattcctcctctgtagctctcctgggtctcttttgtgctaatcccaagattctgtttatccaggtggttgacagagattctgaagaagccgagatcatcaggaagtatgttaagaacactcatgcaaccacacacaatgcgtatgacttggaagtcatcgatgtaagaatcccttcttcccccacttccttctgtgtcctgccagctcttccctgcccactcctccaacctgggcctgggtagaaaagagcagtttatttactttaaataacccaaagaagtgactcatttgttcagcagaaaaattagtagttttttttttgtttgtttgttttttgtttttttttttgacatggagtctcactctatcacccaggctggagtgcagtggtgcaatcccggcctgctgcagcctctgcctcctgggttcaagtgattctcctgtctcagcctccagagtagctgggattacaggcgtgagccaccacactctgctaatttttgtatttttagtagagatagggattcactatgttggccaggctggtcttgaactcctgacctcagatgatccgcctgcgttggcctcccaaagtgctgggattataaaattagcagtcttatacagtagtttggggatggctttttattctgttttaaaggacatttcctgtccccaaacctggtctcagaacatagattatcagatgtccaagataaagttcctcaagtgcacatctgctgcacagtaatactaaccagcaatggctgggcgctgctgggcaggacctggaccttccatcccagccttgtggaaaacactttttacattgcagcagaccttaagtcttctagccttagggacagccggtcatttctcgtgtatccagtcctgtctttcagtcaaccagagtaacaaatggcttcttttgtccttccctttgtttactactccaaccagatctttaagatagagcgtgaaggcgaatgccagcgttacaagccctttaagcagcttcataaccgaagattgctgtggcacgggtccaggaccaccaactttgctgggatcctgtcccagggtcttcggatagccccgcctgaagcgcccgtggtatgtgcctggcctggcgaggggtgggcaatgcctgtctctgcaggtgtctccataaagaactttgagcaagaggtctagttggtttagggggattctgccagacatcctttctttgggccttcacccttttatcctcctgaccctaaccctgtcaggggtttcaaacacagtttctggaacaaaggaggcagagcatccaggccagggcctgctgcagatgctaatcgggtgtgttgacaagcaaagaacagacacgtggctacaggccaagctgagtccaggcttatctctaccacttcccagccgggccacctctgagtgtcagtgtcttcagcaggaaaacgtagcgatgaatgagtaaggctttacctagacacgagggatcgtgatgccacctgctggattctagatgggtccacctggacaggaccttctaagcctcttgtttcacagttgtagaatgaggaggagagaagtttaaatgattctctctggggctgtgcagtagtgtataacgggcaaatggcctaccctttgtgaacctcgtgtttcatttacaaaagggaataaaaataccagcctgcattccttgggtgttgacaggcgctagtttaagtaacactgatgagctcattccgtcctcatggcagctccatgagactgtgttccccatttgagaaaagaggcaagtagagtccagagaggttacgtagcttcttgcagctccttggcacctggcagagctaggatctgacagcctggcttgtgagctaaaactttggtatttcctcaccatgggcattgtgagaattagaagtgatggattgcagcacttagctgggtggcttgctcaagttggcactcagtgaacagctgctcctaatttcccatcagaagattctcagctctcccttttccgaccttccagacaggctacatgtttggtaaagggatctatttcgctgacatggtctccaagagtgccaactactgccatacgtctcagggagacccaataggcttaatcctgttgggagaagttgcccttggaaacatgtgagtaaacctggctctgggactgatggcatttcatggggacaggtggaatgggctataggcagaactccccttggctgggagagtagaaattccccactgcagttactggacgcaccaattaggattcttttcttataagtagcagaatccaattcaagttaagggaacaagggagatacaaggatacttcaggaaatgcaagggcaggaacgcagccaggcctccagagctggcagtgtcttctctccatggactgggaagcagagagattgagttgcacaaaggatgatcccccaggccgcctcctccactcaccagtgtttcagttttcttagaccaacccaaatggaactggaattttaattccacttccagattctccatagagaaagatctgattagtccagcttgatttggacatcgaccctagtcctgtgaactgtaaccaaaagcacaaggtcatgtaaaaggccaggggtctggggactgtggaatgtggacggaaacctagagctgctgaccaccactccaaatagggccttgccttgaaaatggccccatagcagtgatcgctgggcacaaactatgttcagccgcaactgcagtttcaggttctggaacagttccagaaactcaggagggagcctgagcagtttagatggtctgggttttgtggacttttatctcatctctgtatctgatcttattctcctaatcaaactgttggtttcgagagcccagtgtgaaggcctcttctgagactgtcctcttttgaataggtatgaactgaagcacgcttcacatatcagcaagttacccaagggcaagcacagtgtcaaaggtaaagtgtttccaaagctgttgctacagcccgaggcaccctggacagcacagaagccgggggcttgctgtcctgagaaggctgccttgtggctggctgtcaaacagctggagattcattttatcttttcgaggggtgtgtgtgcgttgttgttgttgtttggggggtggtggtggtggttaatatgctgcaactgaccatgattggaggttcattttatttatttttgtaaaaaaaaaaaaaaaataggcaagctctatagcaggaggttcatttttaaaaacagttcactctctgtggctgcagctggtatcacagatgccacaggagaatcttggtgcaggcaccagtaaccagatgcacgggtttcggctttaacctaacttgtagctacagcagtgagggacctctcgtgacatagtagtgcctggagcatcttggattgctagaatttgcagcatatgatttagaaccttccactgcctggttgaagtggccgctttgaaattctattgagccgaaatgtgatcctgtagggagggtactgccactgttctcattaaactcagtgaaggttgatgccctgggaactttggtttattgccttagttttatatctgaagaaagatagagcatgtctttaaaatgagcacatgaggctgggtgtggtggatcacctgaggtcaggagttcgagaccatcctggccaacatggtgaaaccctgtctctactaaaatacagaaaattagctgggtgtggtggcgcgcacctgtaatcccagctactcaggaggctgaggcacgagaattgcttgaatccgggaggcggaggttgcactgagctgaagtcacaccattgcactccggcctgggcgacagtgagactccatctcaaaaaggaaaaaaaaaaaaaagaaagaccacatggacccaacatcaaatagagctcatctccctggaagctttgccacatctgtactcacagttcatgtcacttgtgacttctgtttttcaggtttgggcaaaactacccctgatccttcagctaacattagtctggatggtgtagacgttcctcttgggaccgggatttcatctggtgtgaatgacacctctctactatataacgagtatcctttcttgagtatgctgtgtgagcacaaagggatgttctcgagctacagagtcacttatgtgctgtcagattacctggggcagacaaggattagaggctgtcctgtagtgtgtcccatggtgactgtttcccttctgtggtccctccctgtgcatagcctggcttacagggtatgagccttcccccagtttccagaggatgatctcctctcctcagtctgcctgaagaagacttagagtaactttcaggctggcattgagcatcctgccagccccggggagatgaggcaacccagccccatgaagaggccttagagtgactttcaggctggcactgagcgtcctgccagcctgggggagatgaggcacatgtacataccctctgttgtatggctgttggctccttaacaagcttcccctcaggtacattgtctatgatattgctcaggtaaatctgaagtatctgctgaaactgaaattcaattttaagacctccctgtggtaattgggagaggtagccgagtcacacccggtggctctggtatgaattcacccgaagcgcttctgcaccaactcacctggccgctaagttgctgatgggtagtacctgtactaaaccacctcagaaaggattttacagaaacgtgttaaaggttttctctaacttctcaagtcccttgttttgtgttgtgtctgtggggaggggttgttttggggttgtttttgttttttcttgccaggtagataaaactgacatagagaaaaggctggagagagattctgttgcatagactagtcctatggaaaaaaccaagcttcgttagaatgtctgccttactggtttccccagggaaggaaaaatacacttccacccttttttctaagtgttcgtctttagttttgattttggaaagatgttaagcatttatttttagttaaaaataaaaactaatttcatactatttagattttcttttttatcttgcacttattgtcccctttttagttttttttgtttgcctcttgtggtgaggggtgtgggaagaccaaaggaaggaacgctaacaatttctcatacttagaaacaaaaagagctttccttctccaggaatactgaacatgggagctcttgaaatatgtagtattaaaagttgcatttgaaattcttgactttcttatgggcacttttgtcttccaaattaaaactctaccacaaatatacttacccaagggctaatagtaatactcgattaaaaatgcagatgccttctcta

SEQ ID NO: 114 - RNA, 3978 nt, Homo sapiens
  source 1..3978: mol_type = other RNA
agcaatctatcagggaacggcggtggccggtgcggcgtgttcggtggcggctctggccgctcaggcgcctgcggctgggtgagcgcacgcgaggcggcgaggcggcagcgtgtttctaggtcgtggcgtcgggcttccggagctttggcggcagctaggggaggatggcggagtcttcggataagctctatcgagtcgagtacgccaagagcgggcgcgcctcttgcaagaaatgcagcgagagcatccccaaggactcgctccggatggccatcatggtgcagtcgcccatgtttgatggaaaagtcccacactggtaccacttctcctgcttctggaaggtgggccactccatccggcaccctgacgttgaggtggatgggttctctgagcttcggtgggatgaccagcagaaagtcaagaagacagcggaagctggaggagtgacaggcaaaggccaggatggaattggtagcaaggcagagaagactctgggtgactttgcagcagagtatgccaagtccaacagaagtacgtgcaaggggtgtatggagaagatagaaaagggccaggtgcgcctgtccaagaagatggtggacccggagaagccacagctaggcatgattgaccgctggtaccatccaggctgctttgtcaagaacagggaggagctgggtttccggcccgagtacagtgcgagtcagctcaagggcttcagcctccttgctacagaggataaagaagccctgaagaagcagctcccaggagtcaagagtgaaggaaagagaaaaggcgatgaggtggatggagtggatgaagtggcgaagaagaaatctaaaaaagaaaaagacaaggatagtaagcttgaaaaagccctaaaggctcagaacgacctgatctggaacatcaaggacgagctaaagaaagtgtgttcaactaatgacctgaaggagctactcatcttcaacaagcagcaagtgccttctggggagtcggcgatcttggaccgagtagctgatggcatggtgttcggtgccctccttccctgcgaggaatgctcgggtcagctggtcttcaagagcgatgcctattactgcactggggacgtcactgcctggaccaagtgtatggtcaagacacagacacccaaccggaaggagtgggtaaccccaaaggaattccgagaaatctcttacctcaagaaattgaaggttaaaaaacaggaccgtatattccccccagaaaccagcgcctccgtggcggccacgcctccgccctccacagcctcggctcctgctgctgtgaactcctctgcttcagcagataagccattatccaacatgaagatcctgactctcgggaagctgtcccggaacaaggatgaagtgaaggccatgattgagaaactcggggggaagttgacggggacggccaacaaggcttccctgtgcatcagcaccaaaaaggaggtggaaaagatgaataagaagatggaggaagtaaaggaagccaacatccgagttgtgtctgaggacttcctccaggacgtctccgcctccaccaagagccttcaggagttgttcttagcgcacatcttgtccccttggggggcagaggtgaaggcagagcctgttgaagttgtggccccaagagggaagtcaggggctgcgctctccaaaaaaagcaagggccaggtcaaggaggaaggtatcaacaaatctgaaaagagaatgaaattaactcttaaaggaggagcagctgtggatcctgattctggactggaacactctgcgcatgtcctggagaaaggtgggaaggtcttcagtgccacccttggcctggtggacatcgttaaaggaaccaactcctactacaagctgcagcttctggaggacgacaaggaaaacaggtattggatattcaggtcctggggccgtgtgggtacggtgatcggtagcaacaaactggaacagatgccgtccaaggaggatgccattgagcacttcatgaaattatatgaagaaaaaaccgggaacgcttggcactccaaaaatttcacgaagtatcccaaaaagttctaccccctggagattgactatggccaggatgaagaggcagtgaagaagctgacagtaaatcctggcaccaagtccaagctccccaagccagttcaggacctcatcaagatgatctttgatgtggaaagtatgaagaaagccatggtggagtatgagatcgaccttcagaagatgcccttggggaagctgagcaaaaggcagatccaggccgcatactccatcctcagtgaggtccagcaggcggtgtctcagggcagcagcgactctcagatcctggatctctcaaatcgcttttacaccctgatcccccacgactttgggatgaagaagcctccgctcctgaacaatgcagacagtgtgcaggccaaggtggaaatgcttgacaacctgctggacatcgaggtggcctacagtctgctcaggggagggtctgatgatagcagcaaggatcccatcgatgtcaactatgagaagctcaaaactgacattaaggtggttgacagagattctgaagaagccgagatcatcaggaagtatgttaagaacactcatgcaaccacacacaatgcgtatgacttggaagtcatcgatatctttaagatagagcgtgaaggcgaatgccagcgttacaagccctttaagcagcttcataaccgaagattgctgtggcacgggtccaggaccaccaactttgctgggatcctgtcccagggtcttcggatagccccgcctgaagcgcccgtgacaggctacatgtttggtaaagggatctatttcgctgacatggtctccaagagtgccaactactgccatacgtctcagggagacccaataggcttaatcctgttgggagaagttgcccttggaaacatgtatgaactgaagcacgcttcacatatcagcaagttacccaagggcaagcacagtgtcaaaggtttgggcaaaactacccctgatccttcagctaacattagtctggatggtgtagacgttcctcttgggaccgggatttcatctggtgtgaatgacacctctctactatataacgagtacattgtctatgatattgctcaggtaaatctgaagtatctgctgaaactgaaattcaattttaagacctccctgtggtaattgggagaggtagccgagtcacacccggtggctctggtatgaattcacccgaagcgcttctgcaccaactcacctggccgctaagttgctgatgggtagtacctgtactaaaccacctcagaaaggattttacagaaacgtgttaaaggttttctctaacttctcaagtcccttgttttgtgttgtgtctgtggggaggggttgttttggggttgtttttgttttttcttgccaggtagataaaactgacatagagaaaaggctggagagagattctgttgcatagactagtcctatggaaaaaaccaagcttcgttagaatgtctgccttactggtttccccagggaaggaaaaatacacttccacccttttttctaagtgttcgtctttagttttgattttggaaagatgttaagcatttatttttagttaaaaataaaaactaatttcatactatttagattttcttttttatcttgcacttattgtcccctttttagttttttttgtttgcctcttgtggtgaggggtgtgggaagaccaaaggaaggaacgctaacaatttctcatacttagaaacaaaaagagctttccttctccaggaatactgaacatgggagctcttgaaatatgtagtattaaaagttgcatttgaaattcttgactttcttatgggcacttttgtcttccaaattaaaactctaccacaaatatacttacccaagggctaatagtaatactcgattaaaaatgcagatgccttctcta

SEQ ID NO: 115 - RNA, 3850 nt, Homo sapiens
  source 1..3850: mol_type = other RNA
aggcatcagcaatctatcagggaacggcggtggccggtgcggcgtgttcggtggcggctctggccgctcaggcgcctgcggctgggtgagcgcacgcgaggcggcgaggcggcagcgtgtttctaggtcgtggcgtcgggcttccggagctttggcggcagctaggggaggatggcggagtcttcggataagctctatcgagtcgagtacgccaagagcgggcgcgcctcttgcaagaaatgcagcgagagcatccccaaggactcgctccggatggccatcatggtgcagtcgcccatgtttgatggaaaagtcccacactggtaccacttctcctgcttctggaaggtgggccactccatccggcaccctgacgttgaggtggatgggttctctgagcttcggtgggatgaccagcagaaagtcaagaagacagcggaagctggaggagtgacaggcaaaggccaggatggaattggtagcaaggcagagaagactctgggtgactttgcagcagagtatgccaagtccaacagaagtacgtgcaaggggtgtatggagaagatagaaaagggccaggtgcgcctgtccaagaagatggtggacccggagaagccacagctaggcatgattgaccgctggtaccatccaggctgctttgtcaagaacagggaggagctgggtttccggcccgagtacagtgcgagtcagctcaagggcttcagcctccttgctacagaggataaagaagccctgaagaagcagctcccaggagtcaagagtgaaggaaagagaaaaggcgatgaggtggatggagtggatgaagtggcgaagaagaaatctaaaaaagaaaaagacaaggatagtaagcttgaaaaagccctaaaggctcagaacgacctgatctggaacatcaaggacgagctaaagaaagtgtgttcaactaatgacctgaaggagctactcatcttcaacaagcagcaagtgccttctggggagtcggcgatcttggaccgagtagctgatggcatggtgttcggtgccctccttccctgcgaggaatgctcgggtcagctggtcttcaagagcgatgcctattactgcactggggacgtcactgcctggaccaagtgtatggtcaagacacagacacccaaccggaaggagtgggtaaccccaaaggaattccgagaaatctcttacctcaagaaattgaaggttaaaaaacaggaccgtatattccccccagaaaccagcgcctccgtggcggccacgcctccgccctccacagcctcggctcctgctgctgtgaactcctctgcttcagcagataagccattatccaacatgaagatcctgactctcgggaagctgtcccggaacaaggatgaagtgaaggccatgattgagaaactcggggggaagttgacggggacggccaacaaggcttccctgtgcatcagcaccaaaaaggaggtggaaaagatgaataagaagatggaggaagtaaaggaagccaacatccgagttgtgtctgaggacttcctccaggacgtctccgcctccaccaagagccttcaggagttgttcttagcgcacatcttgtccccttggggggcagaggtgaaggcagagcctgttgaagttgtggccccaagagggaagtcaggggctgcgctctccaaaaaaagcaagggccaggtcaaggaggaaggtatcaacaaatctgaaaagagaatgaaattaactcttaaaggaggagcagctgtggatcctgattctggactggaacactctgcgcatgtcctggagaaaggtgggaaggtcttcagtgccacccttggcctggtggacatcgttaaaggaaccaactcctactacaagctgcagcttctggaggacgacaaggaaaacaggtattggatattcaggtcctggggccgtgtgggtacggtgatcggtagcaacaaactggaacagatgccgtccaaggaggatgccattgagcacttcatgaaattatatgaagaaaaaaccgggaacgcttggcactccaaaaatttcacgaagtatcccaaaaagttctaccccctggagattgactatggccagatcgaccttcagaagatgcccttggggaagctgagcaaaaggcagatccaggccgcatactccatcctcagtgaggtccagcaggcggtgtctcagggcagcagcgactctcagatcctggatctctcaaatcgcttttacaccctgatcccccacgactttgggatgaagaagcctccgctcctgaacaatgcagacagtgtgcaggccaaggtggaaatgcttgacaacctgctggacatcgaggtggcctacagtctgctcaggggagggtctgatgatagcagcaaggatcccatcgatgtcaactatgagaagctcaaaactgacattaaggtggttgacagagattctgaagaagccgagatcatcaggaagtatgttaagaacactcatgcaaccacacacaatgcgtatgacttggaagtcatcgatatctttaagatagagcgtgaaggcgaatgccagcgttacaagccctttaagcagcttcataaccgaagattgctgtggcacgggtccaggaccaccaactttgctgggatcctgtcccagggtcttcggatagccccgcctgaagcgcccgtgacaggctacatgtttggtaaagggatctatttcgctgacatggtctccaagagtgccaactactgccatacgtctcagggagacccaataggcttaatcctgttgggagaagttgcccttggaaacatgtatgaactgaagcacgcttcacatatcagcaagttacccaagggcaagcacagtgtcaaaggtttgggcaaaactacccctgatccttcagctaacattagtctggatggtgtagacgttcctcttgggaccgggatttcatctggtgtgaatgacacctctctactatataacgagtacattgtctatgatattgctcaggtaaatctgaagtatctgctgaaactgaaattcaattttaagacctccctgtggtaattgggagaggtagccgagtcacacccggtggctctggtatgaattcacccgaagcgcttctgcaccaactcacctggccgctaagttgctgatgggtagtacctgtactaaaccacctcagaaaggattttacagaaacgtgttaaaggttttctctaacttctcaagtcccttgttttgtgttgtgtctgtggggaggggttgttttggggttgtttttgttttttcttgccaggtagataaaactgacatagagaaaaggctggagagagattctgttgcatagactagtcctatggaaaaaaccaagcttcgttagaatgtctgccttactggtttccccagggaaggaaaaatacacttccacccttttttctaagtgttcgtctttagttttgattttggaaagatgttaagcatttatttttagttaaaaataaaaactaatttcatactatttagattttcttttttatcttgcacttattgtcccctttttagttttttttgtttgcctcttgtggtgaggggtgtgggaagaccaaaggaaggaacgctaacaatttctcatacttagaaacaaaaagagctttccttctccaggaatactgaacatgggagctcttgaaatatgtagtattaaaagttgcatttgaaattcttgactttcttatgggcacttttgtcttccaaattaaaactctaccacaaatatacttacccaagggctaatagtaatactcgattaaaaatgcagatgcct

SEQ ID NO: 116 - RNA, 3795 nt, Homo sapiens
  source 1..3795: mol_type = other RNA
tgcggctgggtgagcgcacgcgaggcggcgaggcggcagcgtgtttctaggtcgtggcgtcgggcttccggagctttggcggcagctaggggaggatggcggagtcttcggataagctctatcgagtcgagtacgccaagagcgagcgcgcctcttgcaagaaatgcagcgagagcatccccaaggactcgctccggatggccatcatggtgcagtcgcccatgtttgatggaaaagtcccacactggtaccacttctcctgcttctggaaggtgggccactccatccggcaccctgacgttgaggtggatgggttctctgagcttcggtgggatgaccagcagaaagtcaagaagacagcggaagctggaggagtgacaggcaaaggccaggatggaattggtagcaaggcagagaagactctgggtgactttgcagcagagtatgccaagtccaacagaagtacgtgcaaggggtgtatggagaagatagaaaagggccaggtgcgcctgtccaagaagatggtggacccggagaagccacagctaggcatgattgaccgctggtaccatccaggctgctttgtcaagaacagggaggagctgggtttccggcccgagtacagtgcgagtcagctcaagggcttcagcctccttgctacagaggataaagaagccctgaagaagcagctcccaggagtcaagagtgaaggaaagagaaaaggcgataaggtggatggagtggatgaagtggcgaagaagaaatctaaaaaagaaaaagacaaggatagtaagcttgaaaaagccctaaaggctcagaacgacctgatctggaacatcaaggacgagctaaagaaagtgtgttcaactaatgacctgaaggagctactcatcttcaacaagcagcaagtgccttctggggagtcggcgatcttggaccgagtagctgatggcatggtgttcggtgccctccttccctgcgaggaatgctcgggtcagctggtcttcaagagcgatgcctattactgcactggggacgtcactgcctggaccaagtgtatggtcaagacacagacacccaaccggaaggagtgggtaaccccaaaggaattccgagaaatctcttacctcaagaaattgaaggttaaaaagcaggaccgtatattccccccagaaaccagcgcctccgtggcggccacgcctccgccctccacagcctcggctcctgctgctgtgaactcctctgcttcagcagataagccattatccaacatgaagatcctgactctcgggaagctgtcccggaacaaggatgaagtgaaggccatgattgagaaactcggggggaagttaacggggacggccaacaaggcttccctgtgcatcagcaccaaaaaggaggtggaaaagatgaataagaagatggaggaagtaaaggaagccaacatccgagttgtgtctgaggacttcctccaggacgtctccgcctccaccaagagccttcaggagttgttcttagcgcacatcttgtccccttggggggcagaggtgaaggcagagcctgttgaagttgtggccccaagagggaagtcaggggctgcgctctccaaaaaaagcaagggccaggtcaaggaggaaggtatcaacaaatctgaaaagagaatgaaattaactcttaaaggaggagcagctgtggatcctgattctggactggaacactctgcgcatgtcctggagaaaggtgggaaggtcttcagtgccacccttggcctggtggacatcgttaaaggaaccaactcctactacaagctgcagcttctggaggacgacaaggaaaacaggtattggatattcaggtcctggggccgtgtgggtacggtgatcggtagcaacaaactggaacagatgccgtccaaggaggatgccattgagcacttcatgaaattatatgaagaaaaaaccgggaacgcttggcactccaaaaatttcacgaagtatcccaaaaagttctaccccctggagattgactatggccaggatgaagaggcagtgaagaagctgacagtaaatcctggcaccaagtccaagctccccaagccagttcaggacctcatcaagatgatctttgatgtggaaagtatgaagaaagccatggtggagtatgagatcgaccttcagaagatgcccttggggaagctgagcaaaaggcagatccaggccgcatactccatcctcagtgaggtccagcaggcggtgtctcagggcagcagcgactctcagatcctggatctctcaaatcgcttttacaccctgatcccccacgactttgggatgaagaagcctccgctcctgaacaatgcagacagtgtgcaggccaaggtggaaatgcttgacaacctgctggacatcgaggtggcctacagtctgctcaggggagggtctgatgatagcagcaaggatcccatcgatgtcaactatgagaagctcaaaactgacattaaggtggttgacagagattctgaagaagccgagatcatcaggaagtatgttaagaacactcatgcaaccacacacaatgcgtatgacttggaagtcatcgatatctttaagatagagcgtgaaggcgaatgccagcgttacaagccctttaagcagcttcataaccgaagattgctgtggcacgggtccaggaccaccaactttgctgggatcctgtcccagggtcttcggatagccccgcctgaagcgcccgtgacaggctacatgtttggtaaagggatctatttcgctgacatggtctccaagagtgccaactactgccatacgtctcagggagacccaataggcttaatcctgttgggagaagttgcccttggaaacatgtatgaactgaagcacgcttcacatatcagcaagttacccaagggcaagcacagtgtcaaaggtttgggcaaaactacccctgatccttcagctaacattagtctggatggtgtagacgttcctcttgggaccgggatttcatctggtgtgaatgacacctctctactatataacgagtacattgtctatgatattgctcaggtaaatctgaagtatctgctgaaactgaaattcaattttaagacctccctgtggtaattgggagaggtagccgagtcacacccggtggctctggtatgaattcacccgaagcgcttctgcaccaactcacctggccgctaagttgctgatgggtagtacctgtactaaaccacctcagaaaggattttacagaaacgtgttaaaggttttctctaacttctcaagtcccttgttttgtgttgtgtctgtggggaggggttgttttggggttgtttttgttttttcttgccaggtagataaaactgacatagagaaaaggctggagagagattctgttgcatagactagtcctatggaaaaaaccaagcttcgttagaatgtctgccttactggtttccccagggaaggaaaaatacacttccacccttttttctaagtgttcgtctttagttttgattttggaaagatgttaagcatttatttttagttaaaaataaaaactaatttcatactatttagattttcttttttatcttgcacttattgtcccctttttagttttttttgtttgcctcttgtggtgaggggtgtgggaagaccaaaggaaggaacgctaacaatttctcatacttagaaacaaaaagagctttccttctccaggaatactgaacatgggagctcttgaaatatgtagtattaaaagttgcatttg

SEQ ID NO: 117 - RNA, 3677 nt, Homo sapiens
  source 1..3677: mol_type = other RNA
cggtggccggtgcggcgtgttcggtggcggctctggccgctcaggcgcctgcggctgggtgagcgcacgcgaggcggcgaggcggcagcgtgtttctaggtcgtggcgtcgggcttccggagctttgccggcagctaggggaggatggcggagtcttcggataagctctatcgagtcgagtacgccaagagcgggcgcgcctcttgcaagaaatgcagcgagagcatccccaaggactcgctccggatggccatcatggtgcagtcgcccatgtttgatggaaaagtcccacactggtaccacttctcctgcttctggaaggtgggccactccatccggcaccctgacgttgaggtggatgggttctctgagcttcggtgggatgatcagcagaaagtcaagaagacagcggaagctggaggagtgacaggcaaaggccaggatggaattggtagcaaggcagagaagactctgggtgactttgcagcagagtatgccaagtccaacagaagtacgtgcaaggggtgtatggagaagatagaaaagggccaggtgcgcctgtccaagaagatggtggacccggagaagccacagctaggcatgattgaccgctggtaccatccaggctgctttgtcaagaacagggaggagctgggtttccggcccgagtacagtgcgagtcagctcaagggcttcagcctccttgctacagaggataaagaagccctgaagaagcagctcccaggagtcaagagtgaaggaaagagaaaaggcgatgaggtggatggagtggatgaagtggcgaagaagaaatctaaaaaagaaaaagacaaggatagtaagcttgaaaaagccctaaaggctcagaacgacctgatctggaacatcaaggacgagctaaagaaagtgtgttcaactaatgacctgaaggagctactcatcttcaacaagcagcaagtgccttctggggagtcggcgatcttggaccgagtagccgatggcatggtgttcggtgccctccttccctgcgaggaatgctcgggtcagctggtcttcaagagcgatgcctattactgcactggggacgtcactgcctggaccaagtgtatggtcaagacacagacacccaaccggaaggagtgggtaaccccaaaggaattccgagaaatctcttacctcaagaaattgaaggttaaaaaacaggaccgtatattccccccagaaaccagcgcctccgtggcggccacgcctccgccctccacagcctcggctcctgctgctgtgaactcctctgcttcagcagataagccattatccaacatgaagatcctgactctcgggaagctgtcccggaacaaggatgaagtgaaggccatgattgagaaactcggggggaagttgacggggacggccaacaaggcttccctgtgcatcagcaccaaaaaggaggtggaaaagatgaataagaagatggaggaagtaaaggaagccaacatccgagttgtgtctgaggacttcctccaggacgtctccgcctccaccaagagccttcaggagttgttcttagcgcacatcttgtccccttggggggcagaggtgaaggcagagcctgttgaagttgtggccccaagagggaagtcaggggctgcgctctccaaaaaaagcaagggccaggtcaaggaggaaggtatcaacaaatctgaaaagagaatgaaattaactcttaaaggaggagcagctgtggatcctgattctggactggaacactctgcgcatgtcctggagaaaggtgggaaggtcttcagtgccacccttggcctggtggacatcgttaaaggaaccaactcctactacaagctgcagcttctggaggacgacaaggaaaacaggtattggatattcaggtcctggggccgtgtgggtacggtgatcggtagcaacaaactggaacagatgccgtccaaggaggatgccattgagcacttcatgaaattatatgaagaaaaaaccgggaacgcttggcactccaaaaatttcacgaagtatcccaaaaagttctaccccctggagattgactatggccaggatgaagaggcagtgaagaagctgacagtaaatcctggcaccaagtccaagctccccaagccagttcaggacctcatcaagatgatctttgatgtggaaagtatgaagaaagccatggtggagtatgagatcgaccttcagaagatgcccttggggaagctgagcaaaaggcagatccaggccgcatactccatcctcagtgaggtccagcaggcggtgtctcagggcagcagcgactctcagatcctggatctctcaaatcgcttttacaccctgatcccccacgactttgggatgaagaagcctccgctcctgaacaatgcagacagtgtgcaggccaaggcggaaatgcttgacaacctgctggacatcgaggtggcctacagtctgctcaggggagggtctgatgatagcagcaaggatcccatcgatgtcaactatgagaagctcaaaactgacattaaggtggttgacagagattctgaagaagccgagatcatcaggaagtatgttaagaacactcatgcaaccacacacaatgcgtatgacttggaagtcatcgatatctttaagatagagcgtgaaggcgaatgccagcgttacaagccctttaagcagcttcataaccgaagattgctgtggcacgggtccaggaccaccaactttgctgggatcctgtcccagggtcttcggatagccccgcctgaagcgcccgtgacaggctacatgtttggtaaagggatctatttcgctgacatggtctccaagagtgccaactactgccatacgtctcagggagacccaataggcttaatcctgttgggagaagttgcccttggaaacatgtatgaactgaagcacgcttcacatatcagcaagttacccaagggcaagcacagtgtcaaaggtttgggcaaaactacccctgatccttcagctaacattagtctggatggtgtagacgttcctcttgggaccgggatttcatctggtgtgaatgacacctctctactatataacgagtacattgtctatgatattgctcaggtaaatctgaagtatctgctgaaactgaaattcaattttaagacctccctgtggtaattgggagaggtagccgagtcacacccggtggctctggtatgaattcacccgaagcgcttctgcaccaactcacctggccgctaagttgctgatgggtagtacctgtactaaaccacctcagaaaggattttacagaaacgtgttaaaggttttctctaacttctcaagtcccttgttttgtgttgtgtctgtggggaggggttgttttggggttgtttttgttttttcttgccaggtagataaaactgacatagagaaaaggctggagagagattctgttgcatagactagtcctatggaaaaaaccaagcttcgttagaatgtctgccttactggtttccccagggaaggaaaaatacacttccacccttttttctaagtgttcgtctttagttttgattttggaaagatgttaagcatttatttttagttaaaaataaaaactaatttcatactatttaaaaaaaaaaaaaaaaaaaaaaaaaaaa

SEQ ID NO: 118 - RNA, 3640 nt, Homo sapiens
  source 1..3640: mol_type = other RNA
aatctatcaggaacgcgtgcgtcgcgtgttcgtgcggctctggccgctcagctcggctgggtgagcgcacgcgagcgcagcggcagcgtgtttctaggtcgtgcgtcgggcttccggagctttgcggcagctagggaggatggcggagtcttcggataagctctatcgagtcgagtacgccaagagcgggcgcgcctcttgcaagaaatgcagcgagagcatccccaaggactcgctccggatggccatcatggtgcagtcgcccatgtttgatggaaaagtcccacactggtaccacttctcctgcttctggaaggtgggccactccatccggcaccctgacgttcaggtggatgggttctctgagcttcggtgggatgaccagcagaaagtcaagaagacagcggaagctggaggagtgacaggcaaaggccaggatggaattggtagcaaggcagagaagactctgggtgactttgcagcagagtatgccaagtccaacagaagtacgtgcaaggggtgtatggagaagatagaaaagggccaggtgcgcctgtccaagaagatggtggacccggagaagccacagctaggcatgattgaccgctggtaccatccaggctgctttgtcaagaacagggaggagctgggtttccggcccgagtacagtgcgagtcagctcaagggcttcagcctccttgctacagaggataaagaagccctgaagaagcagctcccaggagtcaagagtgaaggaaagagaaaaggcgatgaggtggatggagtggatgaagtggcgaagaagaaatctaaaaaagaaaaagacaaggatagtaagcttgaaaaagccctaaaggctcagaacgacctgatctggaacatcaaggacgagctaaagaaagtgtgttcaactaatgacctgaaggagctactcatcttcaacaagcagcaagtgccttctggggagtcggcgatcttggaccgagtagctgatggcatggtgttcggtgccctccttccctgcgaggaatgctcgggtcagctggtcttcaagagcgatgcctattactgcactggggacgtcactgcctggaccaagtgtatggtcaagacacagacacccaaccggaaggagtgggtaaccccaaaggaattccgagaaatctcttacctcaagaaattgaaggttaaaaagcaggaccgtatattccccccagaaaccagcgcctccgtggcggccacgcctccgccctccacagcctcggctcctgctgctgtgaactcctctgcttcagcagataagccattatccaacatgaagatcctgactctcgggaagctgtcccggaacaaggatgaagtgaaggccatgattgagaaactcggggggaagttgacggggacggccaacaaggcttccctgtgcatcagcaccaaaaaggaggtggaaaagatgaataagaagatggaggaagtaaaggaagccaacatccgagttgtgtctgaggacttcctccaggacgtctccgcctccaccaagagccttcaggagttgttcttagcgcacatcttgtccccttggggggcagaggtgaaggcagagcctgttgaagttgtggccccaagagggaagtcaggggctgcgctctccaaaaaaagcaagggccaggtcaaggaggaaggtatcaacaaatctgaaaagagaatgaaattaactcttaaaggaggagcagctgtggatcctgattctggactggaacactctgcgcatgtcctggagaaaggtgggaaggtcttcagtgccacccttggcctggtggacatcgttaaaggaaccaactcctactacaagctgcagcttctggaggacgacaaggaaaacaggtattggatattcaggtcctggggccgtgtgggtacggtgatcggtagcaacaaactggaacagatgccgtccaaggaggatgccattgagcacttcatgaaattatatgaagaaaaaaccgggaacgcttggcactccaaaaatttcacgaagtatcccaaaaagttctaccccctggagattgactatggccaggatgaagaggcagtgaagaagctgacagtaaatcctggcaccaagtccaagctccccaagccagttcaggacctcatcaagatgatctttgatgtggaaagtatgaagaaagccatggtggagtatgagatcgaccttcagaagatgcccttggggaagctgagcaaaaggcagatccaggccgcatactccatcctcagtgaggtccagcaggcggtgtctcagggcagcagcgactctcagatcctggatctctcaaatcgcttttacaccctgatcccccacgactttgggatgaagaagcctccgctcctgaacaatgcagacagtgtgcaggccaaggtggaaatgcttgacaacctgctggacatcgaggtggcctacagtctgctcaggggagggtctgatgatagcagcaaggatcccatcgatgtcaactatgagaagctcaaaactgacattaaggtggttgacagagattctgaagaagccgagatcatcaggaagtatgttaagaacactcatgcaaccacacacaatgcgtatgacttggaagtcatcgatatctttaagatagagcgtgaaggcgaatgccagcgttacaagccctttaagcagcttcataaccgaagattgctgtggcacgggtccaggaccaccaactttgctgggatcctgtcccagggtcttcggatagccccgcctgaagcgcccgtgacaggctacatgtttggtaaagggatctatttcgctgacatggtctccaagagtgccaactactgccatacgtctcagggagacccaataggcttaatcctgttgggagaagttgcccttggaaacatgtatgaactgaagcacgcttcacatatcagcaagttacccaagggcaagcacagtgtcaaaggtttgggcaaaactacccctgatccttcagctaacattagtctggatggtgtagacgttcctcttgggaccgggatttcatctggtgtgaatgacacctctctactatataacgagtacattgtctatgatattgctcaggtaaatctgaagtatctgctgaaactgaaattcaattttaagacctccctgtggtaattgggagaggtagccgagtcacacccggtggctctggtatgaattcacccgaagcgcttctgcaccaactcacctggccgctaagttgctgatgggtagtacctgtactaaaccacctcagaaaggattttacagaaacgtgttaaaggttttctctaacttctcaagtcccttgttttgtgttgtgtctgtggggaggggttgttttggggttgtttttgttttttcttgccaggtagataaaactgacatagagaaaaggctggagagagattctgttgcatagactagtcctatggaaaaaaccaagcttcgttagaatgtctgccttactggtttccccagggaaggaaaaatacacttccacccttttttctaagtgttcgtctttagttttgattttggaaagatgttaagcatttatttttagttaaaaataaaaactaatttcatact

SEQ ID NO: 119 - RNA, 3660 nt, Homo sapiens
  source 1..3660: mol_type = other RNA
aatctatcagggaacggcggtggccggtgcggcgtgttcggtgcgctctggccgctcaggccgtgcggctgggtgagcgcacgcgaggcggcgaggcggcaagcgtgtttctaggtcgtggcgtcgggcttccggagctttggcggcagctaggggaggatggcggagtcttcggataagctctatcgagtcgagtacgccaagagcgggcgcgcctcttgcaagaaatgcagcgagagcatccccaaggactcgctccggatggccatcatggtgcagtcgcccatgtttgatggaaaagtcccacactggtaccacttctcctgcttctggaaggtgggccactccatccggcaccctgacgttgaggtggatgggttctctgagcttcggtgggatgaccagcagaaagtcaagaagacagcggaagctggaggagtgacaggcaaaggccaggatggaattggtagcaaggcagagaagactctgggtgactttgcagcagagtatgccaagtccaacagaagtacgtgcaaggggtgtatggagaagatagaaaagggccaggtgcgcctgtccaagaagatggtggacccggagaagccacagctaggcatgattgaccgctggtaccatccaggctgctttgtcaagaacagggaggagctgggtttccggcccgagtacagtgcgagtcagctcaagggcttcagcctccttgctacagaggataaagaagccctgaagaagcagctcccaggagtcaagagtgaaggaaagagaaaaggcgatgaggtggatggagtggatgaagtggcgaagaagaaatctaaaaaagaaaaagacaaggatagtaagcttgaaaaagccctaaaggctcagaacgacctgatctggaacatcaaggacgagctaaagaaagtgtgttcaactaatgacctgaaggagctactcatcttcaacaagcagcaagtgccttctggggagtcggcgatcttggaccgagtagctgatggcatggtgttcggtgccctccttccctgcgaggaatgctcgggtcagctggtcttcaagagcgatgcctattactgcactggggacgtcactgcctggaccaagtgtatggtcaagacacagacacccaaccggaaggagtgggtaaccccaaaggaattccgagaaatctcttacctcaagaaattgaaggttaaaaagcaggaccgtatattccccccagaaaccagcgcctccgtggcggccacgcctccgccctccacagcctcggctcctgctgctgtgaactcctctgcttcagcagataagccattatccaacatgaagatcctgactctcgggaagctgtcccggaacaaggatgaagtgaaggccatgattgagaaactcggggggaagttgacggggacggccaacaaggcttccctgtgcatcagcaccaaaaaggaggtggaaaagatgaataagaagatggaggaagtaaaggaagccaacatccgagttgtgtctgaggacttcctccaggacgtctccgcctccaccaagagccttcaggagttgttcttagcgcacatcttgtccccttggggggcagaggtgaaggcagagcctgttgaagttgtggccccaagagggaagtcaggggctgcgctctccaaaaaaagcaagggccaggtcaaggaggaaggtatcaacaaatctgaaaagagaatgaaattaactcttaaaggaggagcagctgtggatcctgattctggactggaacactctgcgcatgtcctggagaaaggtgggaaggtcttcagtgccacccttggcctggtggacatcgttaaaggaaccaactcctactacaagctgcagcttctggaggacgacaaggaaaacaggtattggatattcaggtcctggggccgtgtgggtacggtgatcggtagcaacaaactggaacagatgccgtccaaggaggatgccattgagcagttcatgaaattatatgaagaaaaaaccgggaacgcttggcactccaaaaatttcacgaagtatcccaaaaagttttaccccctggagattgactatggccaggatgaagaggcagtgaagaagctcacagtaaatcctggcaccaagtccaagctccccaagccagttcaggacctcatcaagatgatctttgatgtggaaagtatgaagaaagccatggtggagtatgagatcgaccttcagaagatgcccttggggaagctgagcaaaaggcagatccaggccgcatactccatcctcagtgaggtccagcaggcggtgtctcagggcagcagcgactctcagatcctggatctctcaaatcgcttttacaccctgatcccccacgactttgggatgaagaagcctccgctcctgaacaatgcagacagtgtgcaggccaaggtggaaatgcttgacaacctgctggacatcgaggtggcctacagtctgctcaggggagggtctgatgatagcagcaaggatcccatcgatgtcaactatgagaagctcaaaactgacattaaggtggttgacagagattctgaagaagccgagatcatcaggaagtatgttaagaacactcatgcaaccacacacagtgcgtatgacttggaagtcatcgatatctttaagatagagcgtgaaggcgaatgccagcgttacaagccctttaagcagcttcataaccgaagattgctgtggcacgggtccaggaccaccaactttgctgggatcctgtcccagggtcttcggatagccccgcctgaagcgcccgtgacaggctacatgtttggtaaagggatctatttcgctgacatggtctccaagagtgccaactactaccatacgtctcagggagacccaataggcttaatcctgttgggagaagttgcccttggaaacatgtatgaactgaagcacgcttcacatatcagcaggttacccaagggcaagcacagtgtcaaaggtttgggcaaaactacccctgatccttcagctaacattagtctggatggtgtagacgttcctcttgggaccgggatttcatctggtgtgatagacacctctctactatataacgagtacattgtctatgatattgctcaggtaaatctgaagtatctgctgaaactgaaattcaattttaagacctccctgtggtaattgggagaggtagccgagtcacacccggtggctgtggtatgaattcacccgaagcgcttctgcaccaactcacctggccgctaagttgctgatgggtagtacctgtactaaaccacctcagaaaggattttacagaaacgtgttaaaggttttctctaacttctcaagtcccttgttttgtgttgtgtctgtggggaggggttgttttggggttgtttttgttttttcttgccaggtagataaaactgacatagagaaaaggctggagagagattctgttgcatagactagtcctatggaaaaaaccaaagcttcgttagaatgtctgccttactggtttccccagggaaggaaaaatacacttccacccttttttctaagtgttcgtctttagttttgattttggaaagatgttaagcatttatttttagttaaaataaaaactaatttcatact

SEQ ID NO: 120 - RNA, 3371 nt, Homo sapiens
  source 1..3371: mol_type = other RNA
aatctatcagggaacggcggtggccggtgcggcgtgttcggtggcggctctggccgctcaggcgcctgcggctgggtgagcgcacgcgaggcggcgaggcggcagcgtgtttctaggtcgtggcgtcgggcttccggagctttggcggcagctaggggaggatggcggagtcttcggataagctctatcgagtcgagtacgccaagagcgggcgcgcctcttgcaagaaatgcagcgagagcatccccaaggactcgctccggatggccatcatggtgcagtcgcccatgtttgatggaaaagtcccacactggtaccacttctcctgcttctggaaggtgggccactccatccggcaccctgacgttgaggtggatgggttctctgagcttcggtgggatgaccagcagaaagtcaagaagactctgggtgactttgcagcagagtatgccaagtccaacagaagtacgtgcaaggggtgtatggagaagatagaaaagggccaggtgcgcctgtccaagaagatggtggacccggagaagccacagctaggcatgattgaccgctggtaccatccaggctgctttgtcaagaacagggaggagctgggtttccggcccgagtacagtgcgagtcagctcaagggcttcagcctccttgctacagaggataaagaagccctgaagaagcagctcccaggagtcaagagtgaaggaaagagaaaaggcgatgaggtggatggagtggatgaagtggcgaagaagaaatctaaaaaagaaaaagacaaggatagtaagcttgaaaaagccctaaaggctcagaacgacctgatctggaacatcaaggacgagctaaagaaagtgtgttcaactaatgacctgaaggagctactcatcttcaacaagcagcaagtgccttctggggagtcggcgatcttggaccgagtagccgatggcatggtgttcggtgccctccttccctgcgaggaatgctcgggtcagctggtcttcaagagcgatgcctattactgcactggggacgtcactgcctggaccaagtgtatggtcaagacacagacacccaaccggaaggagtgggtaaccccaaaggaattccgagaaatctcttacctcaagaaattgaaggttaaaaagcaggaccgtatattccccccagaaaccagcgcctccgtggcggccacgcctccgccctccacagcctcggctcctgctgctgtgaactcctctgcttcagcagataagccattatccaacatgaagatcctgactctcgggaagctgtcccggaacaaggatgaagtgaaggccatgattgagaaactcggggggaagttgacggggacggccaacaaggcttccctgtgcatcagcaccaaaaaggaggtggaaaagatgaataagaagatggaggaagtaaaggaagccaacatccgagttgtgtctgaggacttcctccaggacgtctccgcctccaccaagagccttcaggagttgttcttagcgcacatcttgtccccttggggggcagaggtgaaggcagagcctgttgaagttgtggccccaagagggaagtcaggggctgcgctctccaaaaaaagcaagggccaggtcaaggaggaaggtatcaacaaatctgaaaagagaatgaaattaactcttaaaggaggagcagctgtggatcctgattctggactggaacactctgcgcatgtcctggagaaaggtgggaaggtcttcagtgccacccttggcctggtggacatcgttaaaggaaccaactcctactacaagctgcagcttctggaggacgacaaggaaaacaggtattggatattcaggtcctggggccgtgtgggtacggtgatcggtagcaacaaactggaacagatgccgtccaaggaggatgccattgagcacttcatgaaattatatgaagaaaaaaccgggaacgcttggcactccaaaaatttcacgaagtatcccaaaaagttctaccccctggagattgactatggccaggatgaagaggcagtgaagaagctgacagtaaatcctggcaccaagtccaagctccccaagccagttcaggacctcatcaagatgatctttgatgtggaaagtatgaagaaagccatggtggagtatgagatcgaccttcagaagatgcccttggggaagctgagcaaaaggcagatccaggccgcatactccatcctcagtgaggtccagcaggcggtgtctcagggcagcagcgactctcagatcctggatctctcaaatcgcttttacaccctgatcccccacgactttgggatgaagaagcctccgctcctgaacaatgcagacagtgtgcaggccaaggtggaaatgcttgacaacctgctggacatcgaggtggcctacagtctgctcaggggagggtctgatgatagcagcaaggatcccatcgatgtcaactatgagaagctcaaaactgacattaaggtggttgacagagattctgaagaagccgagatcatcaggaattatgttaagaacactcatgcaaccacacacaatgcgtatgacttggaagtcatcgatatctttaagatagagcgtgaaggcgaatgccagcgttacaagccctttaagcagcttcataaccgaagattgctgtggcacgggtccaggaccaccaactttgctgggatcctgtcccagggtcttcggatagccccgcctgaagcgcccgtgacaggctacatgtttggtaaagggatctatttcgctgacatggtctccaagagtgccaactactgccatacgtctcagggagacccaataggcttaatcctgttgggagaagttgcccttggaaacatgtatgaactgaagcacgcttcacatatcagcaagttacccaagggcaagcacagtgtcaaaggtttgggcaaaactacccctgatccttcagctaacattagtctggatggtgtagacgttcctcttgggaccgggatttcatctggtgtgaatgacacctctctactatataacgagtacattgtctatgatattgctcaggtaaatctgaagtatctgctgaaactgaaattcaattttaagacctccctgtggtaattgggagaggtagccgagtcacacccggtggctctggtatgaattcacccgaagcgcttctgcaccaactcacctggccgctaagttgctgatgggtagtacctgtactaaaccacctcagaaaggattttacagaaacgtgttaaaggttttctctaacttctcaagtcccttgttttgtgttgtgtctgtggggaggggttgttttggggttgtttttgttttttt

SEQ ID NO: 121 - RNA, 1771 nt, Homo sapiens
  source 1..1771: mol_type = other RNA
aagaagatggaggaagtaaaggaagccaacatccgagttgtgtctgaggacttcctccaggacgtctccgcctccaccaagagccttcaggagttgttcttagcgcacatcttgtccccttggggggcagaggtgaaggcagagcctgttgaagttgtggccccaagagggaagtcaggggctgcgctctccaaaaaaagcaagggccaggtcaaggaggaaggtatcaacaaatctgaaaagagaatgaaattaactcttaaaggaggagcagctgtggatcctgattctggactggaacactctgcgcatgtcctggagaaaggtgggaaggtcttcagtgccacccttggcctggtggacatcgttaaaggaaccaactcctactacaagctgcagcttctggaggacgacaaggaaaacaggtattggatattcaggtcctggggccgtgtgggtacggtgatcggtagcaacaaactggaacagatgccgtccaaggaggatgccaatgagcacttcatgaaattatatgaagaaaaaaccgggaacgcttggcactccaaaaatttcacgaagtatcccaaaaagttctaccccctggagattgactatggccaggatgaagaggcagtgaagaagctgacagtaaatcctggcaccaagtccaagctccccaagccagttcaggacctcatcaagatgatctttgatgtggaaagtatgaagaaagccatggtggagtatgagatcgaccttcagaagatgcccttggggaagctgagcaaaaggcagatccaggccgcatactccatcctcagtgaggtccagcaggcggtgtctcagggcagcagcgactctcagatcctggatctctcaaatcgcttttacaccctgatcccccacgactttgggatgaagaagcctccgctcctgaacaatgcagacagtgtgcaggccaaggtggaaatgcttgacaacctgctggacatcgaggtggcctacagtctgctcaggggagggtctgatgatagcagcaaggatcccatcgatgtcaactatgagaagctcaaaactgacattaaggtggttgacagagattctgaagaagccgagatcatcaggaagtatgttaagaacactcatgcaaccacacacaatgcgtatgacttggaagtcatcgatatctttaagatagagcgtgaaggcgaatgccagcgttacaagccctttaagcagcttcataaccgaagattgctgtggcacgggtccaggaccaccaactttgctgggatcctgtcccagggtcttcggatagccccgcctgaagcgcccgtgacaggctacatgtttggtaaagggatctatttcgctgacatggtctccaagagtgccaactactgccatacgtctcagggagacccaataggcttaatcctgttgggagaagttgcccttggaaacatgtatgaactgaagcacgcttcacatatcagcaagttacccaagggcaagcacagtgtcaaaggtttgggcaaaactacccctgatccttcagctaacattagtctggatggtgtagacgttcctcttgggaccgggatttcatctggtgtgaatgacacctctctactatataacgagtacattgtctatgatattgctcaggtaaatctgaagtatctgctgaaactgaaattcaattttaagacctccctgtggtaattgggagaggtagccgagtcacacccggtggctctggtatgaattc

SEQ ID NO: 122 - RNA, 3132 nt, Homo sapiens
  source 1..3132: mol_type = other RNA
ggtgagcgcacgcgaggcggcgaggcggcagcgtgtttctaggtcgtggcgtcgggcttccggagctttggcggcagctaggggaggatggcggagtcttcggataagctctatcgagtcgagtacgccaagagcgggcgcgcctcttgcaagaaatgcagcgagagcatccccaaggactcgctccggatggccatcatggtgcagtcgcccatgtttgatggaaaagtcccacactggtaccacttctcctgcttctggaaggtgggccactccatccggcaccctgacgttgaggtggatgggttctctgagcttcggtgggatgaccagcagaaagtcaagaagacagcggaagctggaggagtgacaggcaaaggccaggatggaattggtagcaaggcagagaagactctgggtgactttgcagcagagtatgccaagtccaacagaagtacgtgcaaggggtgtatggagaagatagaaaagggccaggtgcgcctgtccaagaagatggtggacccggagaagccacagctaggcatgattgaccgctggtaccatccaggctgctttgtcaagaacagggaggagctgggtttccggcccgagtacagtgcgagtcagctcaagggcttcagcctccttgctacagaggataaagaagccctgaagaagcagctcccaggagtcaagagtgaaggaaagagaaaaggcgatgaggtggatggagtggatgaagtggcgaagaagaaatctaaaaaagaaaaagacaaggatagtaagcttgaaaaagccctaaaggctcagaacgacctgatctggaacatcaaggacgagctaaagaaagtgtgttcaactaatgacctgaaggagctactcatcttcaacaagcagcaagtgccttctggggagtcggcgatcttggaccgagtagctgatggcatggtgttcggtgccctccttccctgcgaggaatgctcgggtcagctggtcttcaagagcgatgcctattactgcactggggacgtcactgcctggaccaagtgtatggtcaagacacagacacccaaccggaaggagtgggtaaccccaaaggaattccgagaaatctcttacctcaagaaattgaaggttaaaaagcaggaccgtatattccccccagaaaccagcgcctccgtggcggccacgcctccgccctccacagcctcggctcctgctgctgtgaactcctctgcttcagcagataagccattatccaacatgaagatcctgactctcgggaagctgtcccggaacaaggatgaagtgaaggccatgattgagaaactcggggggaagttgacggggacggccaacaaggcttccctgtgcagcagcaccaaaaaggaggtggaaaagatgaataagaagatggaggaagtaaaggaagccaacatccgagttgtgtctgaggacttcctccaggacgtctccgcctccaccaagagccttcaggagttgttcttagcgcacatcttgtccccttggggggcagaggtgaaggcagagcctgttgaagttgtggccccaagagggaagtcaggggctgcgctctccaaaaaaagcaagggccaggtcaaggaggaaggtatcaacaaatctgaaaagagaatgaaattaactcttaaaggaggagcagctgtggatcctgattctggactggaacactctgcgcatgtcctggagaaaggtgggaaggtcttcagtgccacccttggcctggtggacatcgttaaaggaaccaactcctactacaagctgcagcttctggaggacgacaaggaaaacaggtattggatattcaggtcctggggccgtgtgggtacggtgatcggtagcaacaaactggaacagatgccgtccaaggaggatgccattgagcacttcatgaaattatatgaagaaaaaaccgggaacgcttggcactccaaaaatttcacgaagtatcccaaaaggttctaccccctggagattgactatggccaggatgaagaggcagtgaagaagctgacagtaaatcctggcaccaagtccaagctccccaagccagttcaggacctcatcaagatgatctttgatgtggaaagtatgaagaaagccatggtggagtatgagatcgaccttcagaagatgcccttggggaagctgagcaaaaggcagatccaggccgcatactccatcctcagtgaggtccagcaggcggtgtctcagggcagcagcgactctcagatcctggatctctcaaatcgcttttacaccctgatcccccacgactttgggatgaagaagcctccgctcctgaacaatgcagacagtgtgcaggccaaggtggaaatgcttgacaacctgctggacatcgaggtggcctacagtctgctcaggggagggtctgatgatagcagcaaggatcccatcgatgtcaactatgagaagctcaaaactgacattaaggtggttgacagagattctgaagaagccgagatcatcaggaagtatgttaagaacactcatgcaaccacacacaatgcgtatgacttggaagtcatcgatatctttaagatagagcgtgaaggcgaatgccagcgttacaagccctttaagcagcttcataaccgaagattgctgtggcacgggtccaggaccaccaactttgctgggatcctgtcccagggtcttcggatagccccgcctgaagcgcccgtgacaggctacatgtttggtaaagggatctatttcgctgacatggtctccaagagtgccaactactgccatacgtctcagggagacccaataggcttaatcctgttgggagaagttgcccttggaaacatgtatgaactgaagcacgcttcacatatcagcaagttacccaagggcaagcacagtgtcaaaggtttgggcaaaactacccctgatccttcagctaacattagtctggatggtgtagacgttcctcttgggaccgggatttcatctggtgtgaatgacacctctctactatataacgagtacattgtctatgatattgctcaggtaaatctgaagtatctgctgaaactgaaattcaattttaagacctccctgtggtaa

SEQ ID NO: 123 - RNA, 827 nt, Homo sapiens
  source 1..827: mol_type = other RNA
ggcgtgttcggtggcggctctggccgctcaggcgcctgcggctgggtgagcgcacgcgaggcggcgaggcggcagcgtgtttctaggtcgtggcgtcgggcttccggagctttggcggcagctaggggaggatggcggagtcttcggataagctctatcgagtcgagtacgccaagagcgggcgcgcctcttgcaagaaatgcagcgagagcatccccaaggactcgctccggatggccatcatggtgcagtcgcccatgtttgatggaaaagtcccacactggtaccacttctcctgcttctggaaggtgggccactccatccggcaccctgacgttgaggtggatgggttctctgagcttcggtgggatgaccagcagaaagtcaagaagacagcggaagctggaggagtgacaggcaaaggccaggatggaattggtagcaaggcagagaagactctgggtgactttgcagcagagtatgccaagtccaacagaagtacgtgcaaggggtgtatggagaagatagaaaagggccaggtgcgcctgtccaagaagatggtggacccggagaagccacagctaggcatgattgaccgctggtaccatccaggctgctttgtcaagaacagggaggagctgggtttccggcccgagtacagtgcgagtcagctcaagggcttcagcctccttgctacagaggataaagaagccctgaagaagcagctcccaggagtcaagagtgaaggaaagagaaaaggcgatgaggtggatggagtggatgaagtggcgaagaagaaatctaaaaaaaaaaaaaaaaaaaaaaaa

SEQ ID NO: 124 - RNA, 902 nt, Homo sapiens
  source 1..902: mol_type = other RNA
gaacggcggtggccggtgcggcgtgttcggtggcggctctggccgctcaggcgcctgcggctgggtgagcgcacgcgaggcggcgaggcggcagcgtgtttctaggtcgtggcgtcgggcttccggagctttggcggcagctaggggaggatggcggagtcttcggataagctctatcgagtcgagtacgccaagagcgggcgcgcctcttgcaagaaatgcagcgagagcatccccaaggactcgctccggatggccatcatggtgcagtcgcccatgtttgatggaaaagtcccacactggtaccacttctcctgcttctggaaggtgggccactccatccggcaccctgacgttgaggtggatgggttctctgagcttcggtgggatgaccagcagaaagtcaagaagacagcggaagctggaggagtgacaggcaaaggccaggatggaattggtagcaaggcagagaagactctgggtgactttgcagcagagtatgccaagtccaacagaagtacgtgcaaggggtgtatggagaagatagaaaagggccaggtgcgcctgtccaagaagatggtggacccggagaagccacagctaggcatgattgaccgctggtaccatccaggctgctttgtcaagaacagggaggagctgggtttccggcccgagtacagtgcgagtcagctcaagggcttcagcctccttgctacagaggataaagaagccctgaagaagcagctcccaggagtcaagagtgaaggaaagagaaaaggcgatgaggtggatggagtggatgaagtggcgaagaagaaatctaaaaaaaaaaaaaaaaaaaaaaaaaaaaaaaaaaaaaaaaaaaaaaaaaaaaaaaaaaaaaaaaaaaaaaaaaaaaaaaa

SEQ ID NO: 125 - RNA, 553 nt, Homo sapiens
  source 1..553: mol_type = other RNA
ggcggtggccggtgcggcgtgttcggtggcggctctggccgctcaggcgcctgcggctgggtgagcgcacgcgaggcggcgaggcggcagcgtgtttctaggtcgtggcgtcgggcttccggagctttggcggcagctaggggaggatggcggagtcttcggataagctctatcgagtcgagtacgccaagagcgggcgcgcctcttgcaagaaatgcagcgagagcatccccaaggactcgctccggatggccatcatggtgcagtcgcccatgtttgatggaaaagtcccacactggtaccacttctcctgcttctggaaggtgggccactccatccggcaccctgacgttgaggtggatgggttctctgagcttcggtgggatgaccagcagaaagtcaagaagacagcggaagctggaggagtgacagaacctccaataccatgtggaatagaagtgatgggaagatagcttcgtcttattcctaatcttaggcaaaggccaggatggaattggtagcaaggcagagaagactctgggtgactttgcag

SEQ ID NO: 126 - RNA, 477 nt, Homo sapiens
  source 1..477: mol_type = other RNA
gaacggcggtggccggtgcggcgtgttcggtggcggctctggccgctcaggcgcctgcggctgggtgagcgcacgcgaggcggcgaggcggcagcgtgtttctaggtcgtggcgtcgggcttccggagctttggcggcagctaggggaggatggcggagtcttcggataagctctatcgagtcgagtacgccaagagcgggcgcgcctcttgcaagaaatgcagcgagagcatccccaaggactcgctccggatggccatcatggtgcagtcgcccatgtttgatggaaaagtcccacactggtaccacttctcctgcttctggaaggtgggccactccatccggcaccctgacgttgaggtggatgggttctctgagcttcggtgggatgaccagcagaaagtcaagaagacagcggaagctggaggagtgacagaacctccaataccatgtggaatagaagtgatgggaagatag

SEQ ID NO: 127 - RNA, 570 nt, Homo sapiens
  source 1..570: mol_type = other RNA
gtttctaggtcgtggcgtcgggcttccggagctttggcggcagctaggggaggatggcggagtcttcggataagctctatcgagtcgagtacgccaagagcgggcgcgcctcttgcaagaaatgcagcgagagcatccccaaggactcgctccggatggccatcatggtgcagtcgcccatgtttgatggaaaagtcccacactggtaccacttctcctgcttctggaaggtgggccactccatccggcaccctgacgttgaggtggatgggttctctgagcttcggtgggatgaccagcagaaagtcaagaagacagcggaagctggaggagtgacaggtgtgtacatactggggcagcatgggcattcagcccccaccctgaagctcccaggagggcctcgtctcagagagcaaagcaaacctcccccagcttgccctctcccacatgtgcagatcaagcgtatggtgcccatgttatttcagcaacacctcctggactcagcatcatctgttgcatgatatttggtattttgtttttccaggtgcttggaatgtagcctttaaagtt

SEQ ID NO: 128 - RNA, 3958 nt, Homo sapiens
  source 1..3958: mol_type = other RNA
cggtggccggtgcggcgtgttcggtggcggctctggccgctcaggcgcctgcggctgggtgagcgcacgcgaggcggcgaggcggcagcgtgtttctaggtcgtggcgtcgggcttccggagctttggcggcagctaggggaggatggcggagtcttcggataagctctatcgagtcgagtacgccaagagcgggcgcgcctcttgcaagaaatgcagcgagagcatccccaaggactcgctccggatggccatcatggtgcagtcgcccatgtttgatggaaaagtcccacactggtaccacttctcctgcttctggaaggtgggccactccatccggcaccctgacgttgaggtggatgggttctctgagcttcggtgggatgaccagcagaaagtcaagaagacagcggaagctggaggagtgacaggcaaaggccaggatggaattggtagcaaggcagagaagactctgggtgactttgcagcagagtatgccaagtccaacagaagtacgtgcaaggggtgtatggagaagatagaaaagggccaggtgcgcctgtccaagaagatggtggacccggagaagccacagctaggcatgattgaccgctggtaccatccaggctgctttgtcaagaacagggaggagctgggtttccggcccgagtacagtgcgagtcagctcaagggcttcagcctccttgctacagaggataaagaagccctgaagaagcagctcccaggagtcaagagtgaaggaaagagaaaaggcgatgaggtggatggagtggatgaagtggcgaagaagaaatctaaaaaagaaaaagacaaggatagtaagcttgaaaaagccctaaaggctcagaacgacctgatctggaacatcaaggacgagctaaagaaagtgtgttcaactaatgacctgaaggagctactcatcttcaacaagcagcaagtgccttctggggagtcggcgatcttggaccgagtagctgatggcatggtgttcggtgccctccttccctgcgaggaatgctcgggtcagctggtcttcaagagcgatgcctattactgcactggggacgtcactgcctggaccaagtgtatggtcaagacacagacacccaaccggaaggagtgggtaaccccaaaggaattccgagaaatctcttacctcaagaaattgaaggttaaaaaacaggaccgtatattccccccagaaaccagcgcctccgtggcggccacgcctccgccctccacagcctcggctcctgctgctgtgaactcctctgcttcagcagataagccattatccaacatgaagatcctgactctcgggaagctgtcccggaacaaggatgaagtgaaggccatgattgagaaactcggggggaagttgacggggacggccaacaaggcttccctgtgcatcagcaccaaaaaggaggtggaaaagatgaataagaagatggaggaagtaaaggaagccaacatccgagttgtgtctgaggacttcctccaggacgtctccgcctccaccaagagccttcaggagttgttcttagcgcacatcttgtccccttggggggcagaggtgaaggcagagcctgttgaagttgtggccccaagagggaagtcaggggctgcgctctccaaaaaaagcaagggccaggtcaaggaggaaggtatcaacaaatctgaaaagagaatgaaattaactcttaaaggaggagcagctgtggatcctgattctggactggaacactctgcgcatgtcctggagaaaggtgggaaggtcttcagtgccacccttggcctggtggacatcgttaaaggaaccaactcctactacaagctgcagcttctggaggacgacaaggaaaacaggtattggatattcaggtcctggggccgtgtgggtacggtgatcggtagcaacaaactggaacagatgccgtccaaggaggatgccattgagcacttcatgaaattatatgaagaaaaaaccgggaacgcttggcactccaaaaatttcacgaagtatcccaaaaagttctaccccctggagattgactatggccaggatgaagaggcagtgaagaagctgacagtaaatcctggcaccaagtccaagctccccaagccagttcaggacctcatcaagatgatctttgatgtggaaagtatgaagaaagccatggtggagtatgagatcgaccttcagaagatgcccttggggaagctgagcaaaaggcagatccaggccgcatactccatcctcagtgaggtccagcaggcggtgtctcagggcagcagcgactctcagatcctggatctctcaaatcgcttttacaccctgatcccccacgactttgggatgaagaagcctccgctcctgaacaatgcagacagtgtgcaggccaaggtggaaatgcttgacaacctgctggacatcgaggtggcctacagtctgctcaggggagggtctgatgatagcagcaaggatcccatcgatgtcaactatgagaagctcaaaactgacattaaggtggttgacagagattctgaagaagccgagatcatcaggaagtatgttaagaacactcatgcaaccacacacaatgcgtatgacttggaagtcatcgatatctttaagatagagcgtgaaggcgaatgccagcgttacaagccctttaagcagcttcataaccgaagattgctgtggcacgggtccaggaccaccaactttgctgggatcctgtcccagggtcttcggatagccccgcctgaagcgcccgtgacaggctacatgtttggtaaagggatctatttcgctgacatggtctccaagagtgccaactactgccatacgtctcagggagacccaataggcttaatcctgttgggagaagttgcccttggaaacatgtatgaactgaagcacgcttcacatatcagcaagttacccaagggcaagcacagtgtcaaaggtttgggcaaaactacccctgatccttcagctaacattagtctggatggtgtagacgttcctcttgggaccgggatttcatctggtgtgaatgacacctctctactatataacgagtacattgtctatgatattgctcaggtaaatctgaagtatctgctgaaactgaaattcaattttaagacctccctgtggtaattgggagaggtagccgagtcacacccggtggctctggtatgaattcacccgaagcgcttctgcaccaactcacctggccgctaagttgctgatgggtagtacctgtactaaaccacctcagaaaggattttacagaaacgtgttaaaggttttctctaacttctcaagtcccttgttttgtgttgtgtctgtggggaggggttgttttggggttgtttttgttttttcttgccaggtagataaaactgacatagagaaaaggctggagagagattctgttgcatagactagtcctatggaaaaaaccaagcttcgttagaatgtctgccttactggtttccccagggaaggaaaaatacacttccacccttttttctaagtgttcgtctttagttttgattttggaaagatgttaagcatttatttttagttaaaaataaaaactaatttcatactatttagattttcttttttatcttgcacttattgtcccctttttagttttttttgtttgcctcttgtggtgaggggtgtgggaagaccaaaggaaggaacgctaacaatttctcatacttagaaacaaaaagagctttccttctccaggaatactgaacatgggagctcttgaaatatgtagtattaaaagttgcatttgaaattcttgactttcttatgggcacttttgtcttccaaattaaaactctaccacaaatatacttacccaagggctaatagtaatactcgattaaaaatgcagatgccttctcta

SEQ ID NO: 129 - DNA, 3978 bp, Homo sapiens
  source 1..3978: mol_type = genomic DNA
agcaatctatcagggaacggcggtggccggtgcggcgtgttcggtggcggctctggccgctcaggcgcctgcggctgggtgagcgcacgcgaggcggcgaggcggcagcgtgtttctaggtcgtggcgtcgggcttccggagctttggcggcagctaggggaggatggcggagtcttcggataagctctatcgagtcgagtacgccaagagcgggcgcgcctcttgcaagaaatgcagcgagagcatccccaaggactcgctccggatggccatcatggtgcagtcgcccatgtttgatggaaaagtcccacactggtaccacttctcctgcttctggaaggtgggccactccatccggcaccctgacgttgaggtggatgggttctctgagcttcggtgggatgaccagcagaaagtcaagaagacagcggaagctggaggagtgacaggcaaaggccaggatggaattggtagcaaggcagagaagactctgggtgactttgcagcagagtatgccaagtccaacagaagtacgtgcaaggggtgtatggagaagatagaaaagggccaggtgcgcctgtccaagaagatggtggacccggagaagccacagctaggcatgattgaccgctggtaccatccaggctgctttgtcaagaacagggaggagctgggtttccggcccgagtacagtgcgagtcagctcaagggcttcagcctccttgctacagaggataaagaagccctgaagaagcagctcccaggagtcaagagtgaaggaaagagaaaaggcgatgaggtggatggagtggatgaagtggcgaagaagaaatctaaaaaagaaaaagacaaggatagtaagcttgaaaaagccctaaaggctcagaacgacctgatctggaacatcaaggacgagctaaagaaagtgtgttcaactaatgacctgaaggagctactcatcttcaacaagcagcaagtgccttctggggagtcggcgatcttggaccgagtagctgatggcatggtgttcggtgccctccttccctgcgaggaatgctcgggtcagctggtcttcaagagcgatgcctattactgcactggggacgtcactgcctggaccaagtgtatggtcaagacacagacacccaaccggaaggagtgggtaaccccaaaggaattccgagaaatctcttacctcaagaaattgaaggttaaaaaacaggaccgtatattccccccagaaaccagcgcctccgtggcggccacgcctccgccctccacagcctcggctcctgctgctgtgaactcctctgcttcagcagataagccattatccaacatgaagatcctgactctcgggaagctgtcccggaacaaggatgaagtgaaggccatgattgagaaactcggggggaagttgacggggacggccaacaaggcttccctgtgcatcagcaccaaaaaggaggtggaaaagatgaataagaagatggaggaagtaaaggaagccaacatccgagttgtgtctgaggacttcctccaggacgtctccgcctccaccaagagccttcaggagttgttcttagcgcacatcttgtccccttggggggcagaggtgaaggcagagcctgttgaagttgtggccccaagagggaagtcaggggctgcgctctccaaaaaaagcaagggccaggtcaaggaggaaggtatcaacaaatctgaaaagagaatgaaattaactcttaaaggaggagcagctgtggatcctgattctggactggaacactctgcgcatgtcctggagaaaggtgggaaggtcttcagtgccacccttggcctggtggacatcgttaaaggaaccaactcctactacaagctgcagcttctggaggacgacaaggaaaacaggtattggatattcaggtcctggggccgtgtgggtacggtgatcggtagcaacaaactggaacagatgccgtccaaggaggatgccattgagcacttcatgaaattatatgaagaaaaaaccgggaacgcttggcactccaaaaatttcacgaagtatcccaaaaagttctaccccctggagattgactatggccaggatgaagaggcagtgaagaagctgacagtaaatcctggcaccaagtccaagctccccaagccagttcaggacctcatcaagatgatctttgatgtggaaagtatgaagaaagccatggtggagtatgagatcgaccttcagaagatgcccttggggaagctgagcaaaaggcagatccaggccgcatactccatcctcagtgaggtccagcaggcggtgtctcagggcagcagcgactctcagatcctggatctctcaaatcgcttttacaccctgatcccccacgactttgggatgaagaagcctccgctcctgaacaatgcagacagtgtgcaggccaaggtggaaatgcttgacaacctgctggacatcgaggtggcctacagtctgctcaggggagggtctgatgatagcagcaaggatcccatcgatgtcaactatgagaagctcaaaactgacattaaggtggttgacagagattctgaagaagccgagatcatcaggaagtatgttaagaacactcatgcaaccacacacaatgcgtatgacttggaagtcatcgatatctttaagatagagcgtgaaggcgaatgccagcgttacaagccctttaagcagcttcataaccgaagattgctgtggcacgggtccaggaccaccaactttgctgggatcctgtcccagggtcttcggatagccccgcctgaagcgcccgtgacaggctacatgtttggtaaagggatctatttcgctgacatggtctccaagagtgccaactactgccatacgtctcagggagacccaataggcttaatcctgttgggagaagttgcccttggaaacatgtatgaactgaagcacgcttcacatatcagcaagttacccaagggcaagcacagtgtcaaaggtttgggcaaaactacccctgatccttcagctaacattagtctggatggtgtagacgttcctcttgggaccgggatttcatctggtgtgaatgacacctctctactatataacgagtacattgtctatgatattgctcaggtaaatctgaagtatctgctgaaactgaaattcaattttaagacctccctgtggtaattgggagaggtagccgagtcacacccggtggctctggtatgaattcacccgaagcgcttctgcaccaactcacctggccgctaagttgctgatgggtagtacctgtactaaaccacctcagaaaggattttacagaaacgtgttaaaggttttctctaacttctcaagtcccttgttttgtgttgtgtctgtggggaggggttgttttggggttgtttttgttttttcttgccaggtagataaaactgacatagagaaaaggctggagagagattctgttgcatagactagtcctatggaaaaaaccaagcttcgttagaatgtctgccttactggtttccccagggaaggaaaaatacacttccacccttttttctaagtgttcgtctttagttttgattttggaaagatgttaagcatttatttttagttaaaaataaaaactaatttcatactatttagattttcttttttatcttgcacttattgtcccctttttagttttttttgtttgcctcttgtggtgaggggtgtgggaagaccaaaggaaggaacgctaacaatttctcatacttagaaacaaaaagagctttccttctccaggaatactgaacatgggagctcttgaaatatgtagtattaaaagttgcatttgaaattcttgactttcttatgggcacttttgtcttccaaattaaaactctaccacaaatatacttacccaagggctaatagtaatactcgattaaaaatgcagatgccttctcta

SEQ ID NO: 130 - DNA, 3850 bp, Homo sapiens
  source 1..3850: mol_type = genomic DNA
aggcatcagcaatctatcagggaacggcggtggccggtgcggcgtgttcggtggcggctctggccgctcaggcgcctgcggctgggtgagcgcacgcgaggcggcgaggcggcagcgtgtttctaggtcgtggcgtcgggcttccggagctttggcggcagctaggggaggatggcggagtcttcggataagctctatcgagtcgagtacgccaagagcgggcgcgcctcttgcaagaaatgcagcgagagcatccccaaggactcgctccggatggccatcatggtgcagtcgcccatgtttgatggaaaagtcccacactggtaccacttctcctgcttctggaaggtgggccactccatccggcaccctgacgttgaggtggatgggttctctgagcttcggtgggatgaccagcagaaagtcaagaagacagcggaagctggaggagtgacaggcaaaggccaggatggaattggtagcaaggcagagaagactctgggtgactttgcagcagagtatgccaagtccaacagaagtacgtgcaaggggtgtatggagaagatagaaaagggccaggtgcgcctgtccaagaagatggtggacccggagaagccacagctaggcatgattgaccgctggtaccatccaggctgctttgtcaagaacagggaggagctgggtttccggcccgagtacagtgcgagtcagctcaagggcttcagcctccttgctacagaggataaagaagccctgaagaagcagctcccaggagtcaagagtgaaggaaagagaaaaggcgatgaggtggatggagtggatgaagtggcgaagaagaaatctaaaaaagaaaaagacaaggatagtaagcttgaaaaagccctaaaggctcagaacgacctgatctggaacatcaaggacgagctaaagaaagtgtgttcaactaatgacctgaaggagctactcatcttcaacaagcagcaagtgccttctggggagtcggcgatcttggaccgagtagctgatggcatggtgttcggtgccctccttccctgcgaggaatgctcgggtcagctggtcttcaagagcgatgcctattactgcactggggacgtcactgcctggaccaagtgtatggtcaagacacagacacccaaccggaaggagtgggtaaccccaaaggaattccgagaaatctcttacctcaagaaattgaaggttaaaaaacaggaccgtatattccccccagaaaccagcgcctccgtggcggccacgcctccgccctccacagcctcggctcctgctgctgtgaactcctctgcttcagcagataagccattatccaacatgaagatcctgactctcgggaagctgtcccggaacaaggatgaagtgaaggccatgattgagaaactcggggggaagttgacggggacggccaacaaggcttccctgtgcatcagcaccaaaaaggaggtggaaaagatgaataagaagatggaggaagtaaaggaagccaacatccgagttgtgtctgaggacttcctccaggacgtctccgcctccaccaagagccttcaggagttgttcttagcgcacatcttgtccccttggggggcagaggtgaaggcagagcctgttgaagttgtggccccaagagggaagtcaggggctgcgctctccaaaaaaagcaagggccaggtcaaggaggaaggtatcaacaaatctgaaaagagaatgaaattaactcttaaaggaggagcagctgtggatcctgattctggactggaacactctgcgcatgtcctggagaaaggtgggaaggtcttcagtgccacccttggcctggtggacatcgttaaaggaaccaactcctactacaagctgcagcttctggaggacgacaaggaaaacaggtattggatattcaggtcctggggccgtgtgggtacggtgatcggtagcaacaaactggaacagatgccgtccaaggaggatgccattgagcacttcatgaaattatatgaagaaaaaaccgggaacgcttggcactccaaaaatttcacgaagtatcccaaaaagttctaccccctggagattgactatggccagatcgaccttcagaagatgcccttggggaagctgagcaaaaggcagatccaggccgcatactccatcctcagtgaggtccagcaggcggtgtctcagggcagcagcgactctcagatcctggatctctcaaatcgcttttacaccctgatcccccacgactttgggatgaagaagcctccgctcctgaacaatgcagacagtgtgcaggccaaggtggaaatgcttgacaacctgctggacatcgaggtggcctacagtctgctcaggggagggtctgatgatagcagcaaggatcccatcgatgtcaactatgagaagctcaaaactgacattaaggtggttgacagagattctgaagaagccgagatcatcaggaagtatgttaagaacactcatgcaaccacacacaatgcgtatgacttggaagtcatcgatatctttaagatagagcgtgaaggcgaatgccagcgttacaagccctttaagcagcttcataaccgaagattgctgtggcacgggtccaggaccaccaactttgctgggatcctgtcccagggtcttcggatagccccgcctgaagcgcccgtgacaggctacatgtttggtaaagggatctatttcgctgacatggtctccaagagtgccaactactgccatacgtctcagggagacccaataggcttaatcctgttgggagaagttgcccttggaaacatgtatgaactgaagcacgcttcacatatcagcaagttacccaagggcaagcacagtgtcaaaggtttgggcaaaactacccctgatccttcagctaacattagtctggatggtgtagacgttcctcttgggaccgggatttcatctggtgtgaatgacacctctctactatataacgagtacattgtctatgatattgctcaggtaaatctgaagtatctgctgaaactgaaattcaattttaagacctccctgtggtaattgggagaggtagccgagtcacacccggtggctctggtatgaattcacccgaagcgcttctgcaccaactcacctggccgctaagttgctgatgggtagtacctgtactaaaccacctcagaaaggattttacagaaacgtgttaaaggttttctctaacttctcaagtcccttgttttgtgttgtgtctgtggggaggggttgttttggggttgtttttgttttttcttgccaggtagataaaactgacatagagaaaaggctggagagagattctgttgcatagactagtcctatggaaaaaaccaagcttcgttagaatgtctgccttactggtttccccagggaaggaaaaatacacttccacccttttttctaagtgttcgtctttagttttgattttggaaagatgttaagcatttatttttagttaaaaataaaaactaatttcatactatttagattttcttttttatcttgcacttattgtcccctttttagttttttttgtttgcctcttgtggtgaggggtgtgggaagaccaaaggaaggaacgctaacaatttctcatacttagaaacaaaaagagctttccttctccaggaatactgaacatgggagctcttgaaatatgtagtattaaaagttgcatttgaaattcttgactttcttatgggcacttttgtcttccaaattaaaactctaccacaaatatacttacccaagggctaatagtaatactcgattaaaaatgcagatgcct

SEQ ID NO: 131 - DNA, 3795 bp, Homo sapiens
  source 1..3795: mol_type = genomic DNA
tgcggctgggtgagcgcacgcgaggcggcgaggcggcagcgtgtttctaggtcgtggcgtcgggcttccggagctttggcggcagctaggggaggatggcggagtcttcggataagctctatcgagtcgagtacgccaagagcgagcgcgcctcttgcaagaaatgcagcgagagcatccccaaggactcgctccggatggccatcatggtgcagtcgcccatgtttgatggaaaagtcccacactggtaccacttctcctgcttctggaaggtgggccactccatccggcaccctgacgttgaggtggatgggttctctgagcttcggtgggatgaccagcagaaagtcaagaagacagcggaagctggaggagtgacaggcaaaggccaggatggaattggtagcaaggcagagaagactctgggtgactttgcagcagagtatgccaagtccaacagaagtacgtgcaaggggtgtatggagaagatagaaaagggccaggtgcgcctgtccaagaagatggtggacccggagaagccacagctaggcatgattgaccgctggtaccatccaggctgctttgtcaagaacagggaggagctgggtttccggcccgagtacagtgcgagtcagctcaagggcttcagcctccttgctacagaggataaagaagccctgaagaagcagctcccaggagtcaagagtgaaggaaagagaaaaggcgataaggtggatggagtggatgaagtggcgaagaagaaatctaaaaaagaaaaagacaaggatagtaagcttgaaaaagccctaaaggctcagaacgacctgatctggaacatcaaggacgagctaaagaaagtgtgttcaactaatgacctgaaggagctactcatcttcaacaagcagcaagtgccttctggggagtcggcgatcttggaccgagtagctgatggcatggtgttcggtgccctccttccctgcgaggaatgctcgggtcagctggtcttcaagagcgatgcctattactgcactggggacgtcactgcctggaccaagtgtatggtcaagacacagacacccaaccggaaggagtgggtaaccccaaaggaattccgagaaatctcttacctcaagaaattgaaggttaaaaagcaggaccgtatattccccccagaaaccagcgcctccgtggcggccacgcctccgccctccacagcctcggctcctgctgctgtgaactcctctgcttcagcagataagccattatccaacatgaagatcctgactctcgggaagctgtcccggaacaaggatgaagtgaaggccatgattgagaaactcggggggaagttaacggggacggccaacaaggcttccctgtgcatcagcaccaaaaaggaggtggaaaagatgaataagaagatggaggaagtaaaggaagccaacatccgagttgtgtctgaggacttcctccaggacgtctccgcctccaccaagagccttcaggagttgttcttagcgcacatcttgtccccttggggggcagaggtgaaggcagagcctgttgaagttgtggccccaagagggaagtcaggggctgcgctctccaaaaaaagcaagggccaggtcaaggaggaaggtatcaacaaatctgaaaagagaatgaaattaactcttaaaggaggagcagctgtggatcctgattctggactggaacactctgcgcatgtcctggagaaaggtgggaaggtcttcagtgccacccttggcctggtggacatcgttaaaggaaccaactcctactacaagctgcagcttctggaggacgacaaggaaaacaggtattggatattcaggtcctggggccgtgtgggtacggtgatcggtagcaacaaactggaacagatgccgtccaaggaggatgccattgagcacttcatgaaattatatgaagaaaaaaccgggaacgcttggcactccaaaaatttcacgaagtatcccaaaaagttctaccccctggagattgactatggccaggatgaagaggcagtgaagaagctgacagtaaatcctggcaccaagtccaagctccccaagccagttcaggacctcatcaagatgatctttgatgtggaaagtatgaagaaagccatggtggagtatgagatcgaccttcagaagatgcccttggggaagctgagcaaaaggcagatccaggccgcatactccatcctcagtgaggtccagcaggcggtgtctcagggcagcagcgactctcagatcctggatctctcaaatcgcttttacaccctgatcccccacgactttgggatgaagaagcctccgctcctgaacaatgcagacagtgtgcaggccaaggtggaaatgcttgacaacctgctggacatcgaggtggcctacagtctgctcaggggagggtctgatgatagcagcaaggatcccatcgatgtcaactatgagaagctcaaaactgacattaaggtggttgacagagattctgaagaagccgagatcatcaggaagtatgttaagaacactcatgcaaccacacacaatgcgtatgacttggaagtcatcgatatctttaagatagagcgtgaaggcgaatgccagcgttacaagccctttaagcagcttcataaccgaagattgctgtggcacgggtccaggaccaccaactttgctgggatcctgtcccagggtcttcggatagccccgcctgaagcgcccgtgacaggctacatgtttggtaaagggatctatttcgctgacatggtctccaagagtgccaactactgccatacgtctcagggagacccaataggcttaatcctgttgggagaagttgcccttggaaacatgtatgaactgaagcacgcttcacatatcagcaagttacccaagggcaagcacagtgtcaaaggtttgggcaaaactacccctgatccttcagctaacattagtctggatggtgtagacgttcctcttgggaccgggatttcatctggtgtgaatgacacctctctactatataacgagtacattgtctatgatattgctcaggtaaatctgaagtatctgctgaaactgaaattcaattttaagacctccctgtggtaattgggagaggtagccgagtcacacccggtggctctggtatgaattcacccgaagcgcttctgcaccaactcacctggccgctaagttgctgatgggtagtacctgtactaaaccacctcagaaaggattttacagaaacgtgttaaaggttttctctaacttctcaagtcccttgttttgtgttgtgtctgtggggaggggttgttttggggttgtttttgttttttcttgccaggtagataaaactgacatagagaaaaggctggagagagattctgttgcatagactagtcctatggaaaaaaccaagcttcgttagaatgtctgccttactggtttccccagggaaggaaaaatacacttccacccttttttctaagtgttcgtctttagttttgattttggaaagatgttaagcatttatttttagttaaaaataaaaactaatttcatactatttagattttcttttttatcttgcacttattgtcccctttttagttttttttgtttgcctcttgtggtgaggggtgtgggaagaccaaaggaaggaacgctaacaatttctcatacttagaaacaaaaagagctttccttctccaggaatactgaacatgggagctcttgaaatatgtagtattaaaagttgcatttg

SEQ ID NO: 132 - DNA, 3677 bp, Homo sapiens
  source 1..3677: mol_type = genomic DNA
cggtggccggtgcggcgtgttcggtggcggctctggccgctcaggcgcctgcggctgggtgagcgcacgcgaggcggcgaggcggcagcgtgtttctaggtcgtggcgtcgggcttccggagctttgccggcagctaggggaggatggcggagtcttcggataagctctatcgagtcgagtacgccaagagcgggcgcgcctcttgcaagaaatgcagcgagagcatccccaaggactcgctccggatggccatcatggtgcagtcgcccatgtttgatggaaaagtcccacactggtaccacttctcctgcttctggaaggtgggccactccatccggcaccctgacgttgaggtggatgggttctctgagcttcggtgggatgatcagcagaaagtcaagaagacagcggaagctggaggagtgacaggcaaaggccaggatggaattggtagcaaggcagagaagactctgggtgactttgcagcagagtatgccaagtccaacagaagtacgtgcaaggggtgtatggagaagatagaaaagggccaggtgcgcctgtccaagaagatggtggacccggagaagccacagctaggcatgattgaccgctggtaccatccaggctgctttgtcaagaacagggaggagctgggtttccggcccgagtacagtgcgagtcagctcaagggcttcagcctccttgctacagaggataaagaagccctgaagaagcagctcccaggagtcaagagtgaaggaaagagaaaaggcgatgaggtggatggagtggatgaagtggcgaagaagaaatctaaaaaagaaaaagacaaggatagtaagcttgaaaaagccctaaaggctcagaacgacctgatctggaacatcaaggacgagctaaagaaagtgtgttcaactaatgacctgaaggagctactcatcttcaacaagcagcaagtgccttctggggagtcggcgatcttggaccgagtagccgatggcatggtgttcggtgccctccttccctgcgaggaatgctcgggtcagctggtcttcaagagcgatgcctattactgcactggggacgtcactgcctggaccaagtgtatggtcaagacacagacacccaaccggaaggagtgggtaaccccaaaggaattccgagaaatctcttacctcaagaaattgaaggttaaaaaacaggaccgtatattccccccagaaaccagcgcctccgtggcggccacgcctccgccctccacagcctcggctcctgctgctgtgaactcctctgcttcagcagataagccattatccaacatgaagatcctgactctcgggaagctgtcccggaacaaggatgaagtgaaggccatgattgagaaactcggggggaagttgacggggacggccaacaaggcttccctgtgcatcagcaccaaaaaggaggtggaaaagatgaataagaagatggaggaagtaaaggaagccaacatccgagttgtgtctgaggacttcctccaggacgtctccgcctccaccaagagccttcaggagttgttcttagcgcacatcttgtccccttggggggcagaggtgaaggcagagcctgttgaagttgtggccccaagagggaagtcaggggctgcgctctccaaaaaaagcaagggccaggtcaaggaggaaggtatcaacaaatctgaaaagagaatgaaattaactcttaaaggaggagcagctgtggatcctgattctggactggaacactctgcgcatgtcctggagaaaggtgggaaggtcttcagtgccacccttggcctggtggacatcgttaaaggaaccaactcctactacaagctgcagcttctggaggacgacaaggaaaacaggtattggatattcaggtcctggggccgtgtgggtacggtgatcggtagcaacaaactggaacagatgccgtccaaggaggatgccattgagcacttcatgaaattatatgaagaaaaaaccgggaacgcttggcactccaaaaatttcacgaagtatcccaaaaagttctaccccctggagattgactatggccaggatgaagaggcagtgaagaagctgacagtaaatcctggcaccaagtccaagctccccaagccagttcaggacctcatcaagatgatctttgatgtggaaagtatgaagaaagccatggtggagtatgagatcgaccttcagaagatgcccttggggaagctgagcaaaaggcagatccaggccgcatactccatcctcagtgaggtccagcaggcggtgtctcagggcagcagcgactctcagatcctggatctctcaaatcgcttttacaccctgatcccccacgactttgggatgaagaagcctccgctcctgaacaatgcagacagtgtgcaggccaaggcggaaatgcttgacaacctgctggacatcgaggtggcctacagtctgctcaggggagggtctgatgatagcagcaaggatcccatcgatgtcaactatgagaagctcaaaactgacattaaggtggttgacagagattctgaagaagccgagatcatcaggaagtatgttaagaacactcatgcaaccacacacaatgcgtatgacttggaagtcatcgatatctttaagatagagcgtgaaggcgaatgccagcgttacaagccctttaagcagcttcataaccgaagattgctgtggcacgggtccaggaccaccaactttgctgggatcctgtcccagggtcttcggatagccccgcctgaagcgcccgtgacaggctacatgtttggtaaagggatctatttcgctgacatggtctccaagagtgccaactactgccatacgtctcagggagacccaataggcttaatcctgttgggagaagttgcccttggaaacatgtatgaactgaagcacgcttcacatatcagcaagttacccaagggcaagcacagtgtcaaaggtttgggcaaaactacccctgatccttcagctaacattagtctggatggtgtagacgttcctcttgggaccgggatttcatctggtgtgaatgacacctctctactatataacgagtacattgtctatgatattgctcaggtaaatctgaagtatctgctgaaactgaaattcaattttaagacctccctgtggtaattgggagaggtagccgagtcacacccggtggctctggtatgaattcacccgaagcgcttctgcaccaactcacctggccgctaagttgctgatgggtagtacctgtactaaaccacctcagaaaggattttacagaaacgtgttaaaggttttctctaacttctcaagtcccttgttttgtgttgtgtctgtggggaggggttgttttggggttgtttttgttttttcttgccaggtagataaaactgacatagagaaaaggctggagagagattctgttgcatagactagtcctatggaaaaaaccaagcttcgttagaatgtctgccttactggtttccccagggaaggaaaaatacacttccacccttttttctaagtgttcgtctttagttttgattttggaaagatgttaagcatttatttttagttaaaaataaaaactaatttcatactatttaaaaaaaaaaaaaaaaaaaaaaaaaaaa

SEQ ID NO: 133 - DNA, 3640 bp, Homo sapiens
  source 1..3640: mol_type = genomic DNA
aatctatcaggaacgcgtgcgtcgcgtgttcgtgcggctctggccgctcagctcggctgggtgagcgcacgcgagcgcagcggcagcgtgtttctaggtcgtgcgtcgggcttccggagctttgcggcagctagggaggatggcggagtcttcggataagctctatcgagtcgagtacgccaagagcgggcgcgcctcttgcaagaaatgcagcgagagcatccccaaggactcgctccggatggccatcatggtgcagtcgcccatgtttgatggaaaagtcccacactggtaccacttctcctgcttctggaaggtgggccactccatccggcaccctgacgttcaggtggatgggttctctgagcttcggtgggatgaccagcagaaagtcaagaagacagcggaagctggaggagtgacaggcaaaggccaggatggaattggtagcaaggcagagaagactctgggtgactttgcagcagagtatgccaagtccaacagaagtacgtgcaaggggtgtatggagaagatagaaaagggccaggtgcgcctgtccaagaagatggtggacccggagaagccacagctaggcatgattgaccgctggtaccatccaggctgctttgtcaagaacagggaggagctgggtttccggcccgagtacagtgcgagtcagctcaagggcttcagcctccttgctacagaggataaagaagccctgaagaagcagctcccaggagtcaagagtgaaggaaagagaaaaggcgatgaggtggatggagtggatgaagtggcgaagaagaaatctaaaaaagaaaaagacaaggatagtaagcttgaaaaagccctaaaggctcagaacgacctgatctggaacatcaaggacgagctaaagaaagtgtgttcaactaatgacctgaaggagctactcatcttcaacaagcagcaagtgccttctggggagtcggcgatcttggaccgagtagctgatggcatggtgttcggtgccctccttccctgcgaggaatgctcgggtcagctggtcttcaagagcgatgcctattactgcactggggacgtcactgcctggaccaagtgtatggtcaagacacagacacccaaccggaaggagtgggtaaccccaaaggaattccgagaaatctcttacctcaagaaattgaaggttaaaaagcaggaccgtatattccccccagaaaccagcgcctccgtggcggccacgcctccgccctccacagcctcggctcctgctgctgtgaactcctctgcttcagcagataagccattatccaacatgaagatcctgactctcgggaagctgtcccggaacaaggatgaagtgaaggccatgattgagaaactcggggggaagttgacggggacggccaacaaggcttccctgtgcatcagcaccaaaaaggaggtggaaaagatgaataagaagatggaggaagtaaaggaagccaacatccgagttgtgtctgaggacttcctccaggacgtctccgcctccaccaagagccttcaggagttgttcttagcgcacatcttgtccccttggggggcagaggtgaaggcagagcctgttgaagttgtggccccaagagggaagtcaggggctgcgctctccaaaaaaagcaagggccaggtcaaggaggaaggtatcaacaaatctgaaaagagaatgaaattaactcttaaaggaggagcagctgtggatcctgattctggactggaacactctgcgcatgtcctggagaaaggtgggaaggtcttcagtgccacccttggcctggtggacatcgttaaaggaaccaactcctactacaagctgcagcttctggaggacgacaaggaaaacaggtattggatattcaggtcctggggccgtgtgggtacggtgatcggtagcaacaaactggaacagatgccgtccaaggaggatgccattgagcacttcatgaaattatatgaagaaaaaaccgggaacgcttggcactccaaaaatttcacgaagtatcccaaaaagttctaccccctggagattgactatggccaggatgaagaggcagtgaagaagctgacagtaaatcctggcaccaagtccaagctccccaagccagttcaggacctcatcaagatgatctttgatgtggaaagtatgaagaaagccatggtggagtatgagatcgaccttcagaagatgcccttggggaagctgagcaaaaggcagatccaggccgcatactccatcctcagtgaggtccagcaggcggtgtctcagggcagcagcgactctcagatcctggatctctcaaatcgcttttacaccctgatcccccacgactttgggatgaagaagcctccgctcctgaacaatgcagacagtgtgcaggccaaggtggaaatgcttgacaacctgctggacatcgaggtggcctacagtctgctcaggggagggtctgatgatagcagcaaggatcccatcgatgtcaactatgagaagctcaaaactgacattaaggtggttgacagagattctgaagaagccgagatcatcaggaagtatgttaagaacactcatgcaaccacacacaatgcgtatgacttggaagtcatcgatatctttaagatagagcgtgaaggcgaatgccagcgttacaagccctttaagcagcttcataaccgaagattgctgtggcacgggtccaggaccaccaactttgctgggatcctgtcccagggtcttcggatagccccgcctgaagcgcccgtgacaggctacatgtttggtaaagggatctatttcgctgacatggtctccaagagtgccaactactgccatacgtctcagggagacccaataggcttaatcctgttgggagaagttgcccttggaaacatgtatgaactgaagcacgcttcacatatcagcaagttacccaagggcaagcacagtgtcaaaggtttgggcaaaactacccctgatccttcagctaacattagtctggatggtgtagacgttcctcttgggaccgggatttcatctggtgtgaatgacacctctctactatataacgagtacattgtctatgatattgctcaggtaaatctgaagtatctgctgaaactgaaattcaattttaagacctccctgtggtaattgggagaggtagccgagtcacacccggtggctctggtatgaattcacccgaagcgcttctgcaccaactcacctggccgctaagttgctgatgggtagtacctgtactaaaccacctcagaaaggattttacagaaacgtgttaaaggttttctctaacttctcaagtcccttgttttgtgttgtgtctgtggggaggggttgttttggggttgtttttgttttttcttgccaggtagataaaactgacatagagaaaaggctggagagagattctgttgcatagactagtcctatggaaaaaaccaagcttcgttagaatgtctgccttactggtttccccagggaaggaaaaatacacttccacccttttttctaagtgttcgtctttagttttgattttggaaagatgttaagcatttatttttagttaaaaataaaaactaatttcatact

SEQ ID NO: 134 - DNA, 3660 bp, Homo sapiens
  source 1..3660: mol_type = genomic DNA
aatctatcagggaacggcggtggccggtgcggcgtgttcggtgcgctctggccgctcaggccgtgcggctgggtgagcgcacgcgaggcggcgaggcggcaagcgtgtttctaggtcgtggcgtcgggcttccggagctttggcggcagctaggggaggatggcggagtcttcggataagctctatcgagtcgagtacgccaagagcgggcgcgcctcttgcaagaaatgcagcgagagcatccccaaggactcgctccggatggccatcatggtgcagtcgcccatgtttgatggaaaagtcccacactggtaccacttctcctgcttctggaaggtgggccactccatccggcaccctgacgttgaggtggatgggttctctgagcttcggtgggatgaccagcagaaagtcaagaagacagcggaagctggaggagtgacaggcaaaggccaggatggaattggtagcaaggcagagaagactctgggtgactttgcagcagagtatgccaagtccaacagaagtacgtgcaaggggtgtatggagaagatagaaaagggccaggtgcgcctgtccaagaagatggtggacccggagaagccacagctaggcatgattgaccgctggtaccatccaggctgctttgtcaagaacagggaggagctgggtttccggcccgagtacagtgcgagtcagctcaagggcttcagcctccttgctacagaggataaagaagccctgaagaagcagctcccaggagtcaagagtgaaggaaagagaaaaggcgatgaggtggatggagtggatgaagtggcgaagaagaaatctaaaaaagaaaaagacaaggatagtaagcttgaaaaagccctaaaggctcagaacgacctgatctggaacatcaaggacgagctaaagaaagtgtgttcaactaatgacctgaaggagctactcatcttcaacaagcagcaagtgccttctggggagtcggcgatcttggaccgagtagctgatggcatggtgttcggtgccctccttccctgcgaggaatgctcgggtcagctggtcttcaagagcgatgcctattactgcactggggacgtcactgcctggaccaagtgtatggtcaagacacagacacccaaccggaaggagtgggtaaccccaaaggaattccgagaaatctcttacctcaagaaattgaaggttaaaaagcaggaccgtatattccccccagaaaccagcgcctccgtggcggccacgcctccgccctccacagcctcggctcctgctgctgtgaactcctctgcttcagcagataagccattatccaacatgaagatcctgactctcgggaagctgtcccggaacaaggatgaagtgaaggccatgattgagaaactcggggggaagttgacggggacggccaacaaggcttccctgtgcatcagcaccaaaaaggaggtggaaaagatgaataagaagatggaggaagtaaaggaagccaacatccgagttgtgtctgaggacttcctccaggacgtctccgcctccaccaagagccttcaggagttgttcttagcgcacatcttgtccccttggggggcagaggtgaaggcagagcctgttgaagttgtggccccaagagggaagtcaggggctgcgctctccaaaaaaagcaagggccaggtcaaggaggaaggtatcaacaaatctgaaaagagaatgaaattaactcttaaaggaggagcagctgtggatcctgattctggactggaacactctgcgcatgtcctggagaaaggtgggaaggtcttcagtgccacccttggcctggtggacatcgttaaaggaaccaactcctactacaagctgcagcttctggaggacgacaaggaaaacaggtattggatattcaggtcctggggccgtgtgggtacggtgatcggtagcaacaaactggaacagatgccgtccaaggaggatgccattgagcagttcatgaaattatatgaagaaaaaaccgggaacgcttggcactccaaaaatttcacgaagtatcccaaaaagttttaccccctggagattgactatggccaggatgaagaggcagtgaagaagctcacagtaaatcctggcaccaagtccaagctccccaagccagttcaggacctcatcaagatgatctttgatgtggaaagtatgaagaaagccatggtggagtatgagatcgaccttcagaagatgcccttggggaagctgagcaaaaggcagatccaggccgcatactccatcctcagtgaggtccagcaggcggtgtctcagggcagcagcgactctcagatcctggatctctcaaatcgcttttacaccctgatcccccacgactttgggatgaagaagcctccgctcctgaacaatgcagacagtgtgcaggccaaggtggaaatgcttgacaacctgctggacatcgaggtggcctacagtctgctcaggggagggtctgatgatagcagcaaggatcccatcgatgtcaactatgagaagctcaaaactgacattaaggtggttgacagagattctgaagaagccgagatcatcaggaagtatgttaagaacactcatgcaaccacacacagtgcgtatgacttggaagtcatcgatatctttaagatagagcgtgaaggcgaatgccagcgttacaagccctttaagcagcttcataaccgaagattgctgtggcacgggtccaggaccaccaactttgctgggatcctgtcccagggtcttcggatagccccgcctgaagcgcccgtgacaggctacatgtttggtaaagggatctatttcgctgacatggtctccaagagtgccaactactaccatacgtctcagggagacccaataggcttaatcctgttgggagaagttgcccttggaaacatgtatgaactgaagcacgcttcacatatcagcaggttacccaagggcaagcacagtgtcaaaggtttgggcaaaactacccctgatccttcagctaacattagtctggatggtgtagacgttcctcttgggaccgggatttcatctggtgtgatagacacctctctactatataacgagtacattgtctatgatattgctcaggtaaatctgaagtatctgctgaaactgaaattcaattttaagacctccctgtggtaattgggagaggtagccgagtcacacccggtggctgtggtatgaattcacccgaagcgcttctgcaccaactcacctggccgctaagttgctgatgggtagtacctgtactaaaccacctcagaaaggattttacagaaacgtgttaaaggttttctctaacttctcaagtcccttgttttgtgttgtgtctgtggggaggggttgttttggggttgtttttgttttttcttgccaggtagataaaactgacatagagaaaaggctggagagagattctgttgcatagactagtcctatggaaaaaaccaaagcttcgttagaatgtctgccttactggtttccccagggaaggaaaaatacacttccacccttttttctaagtgttcgtctttagttttgattttggaaagatgttaagcatttatttttagttaaaataaaaactaatttcatact

SEQ ID NO: 135 - DNA, 3371 bp, Homo sapiens
  source 1..3371: mol_type = genomic DNA
aatctatcagggaacggcggtggccggtgcggcgtgttcggtggcggctctggccgctcaggcgcctgcggctgggtgagcgcacgcgaggcggcgaggcggcagcgtgtttctaggtcgtggcgtcgggcttccggagctttggcggcagctaggggaggatggcggagtcttcggataagctctatcgagtcgagtacgccaagagcgggcgcgcctcttgcaagaaatgcagcgagagcatccccaaggactcgctccggatggccatcatggtgcagtcgcccatgtttgatggaaaagtcccacactggtaccacttctcctgcttctggaaggtgggccactccatccggcaccctgacgttgaggtggatgggttctctgagcttcggtgggatgaccagcagaaagtcaagaagactctgggtgactttgcagcagagtatgccaagtccaacagaagtacgtgcaaggggtgtatggagaagatagaaaagggccaggtgcgcctgtccaagaagatggtggacccggagaagccacagctaggcatgattgaccgctggtaccatccaggctgctttgtcaagaacagggaggagctgggtttccggcccgagtacagtgcgagtcagctcaagggcttcagcctccttgctacagaggataaagaagccctgaagaagcagctcccaggagtcaagagtgaaggaaagagaaaaggcgatgaggtggatggagtggatgaagtggcgaagaagaaatctaaaaaagaaaaagacaaggatagtaagcttgaaaaagccctaaaggctcagaacgacctgatctggaacatcaaggacgagctaaagaaagtgtgttcaactaatgacctgaaggagctactcatcttcaacaagcagcaagtgccttctggggagtcggcgatcttggaccgagtagccgatggcatggtgttcggtgccctccttccctgcgaggaatgctcgggtcagctggtcttcaagagcgatgcctattactgcactggggacgtcactgcctggaccaagtgtatggtcaagacacagacacccaaccggaaggagtgggtaaccccaaaggaattccgagaaatctcttacctcaagaaattgaaggttaaaaagcaggaccgtatattccccccagaaaccagcgcctccgtggcggccacgcctccgccctccacagcctcggctcctgctgctgtgaactcctctgcttcagcagataagccattatccaacatgaagatcctgactctcgggaagctgtcccggaacaaggatgaagtgaaggccatgattgagaaactcggggggaagttgacggggacggccaacaaggcttccctgtgcatcagcaccaaaaaggaggtggaaaagatgaataagaagatggaggaagtaaaggaagccaacatccgagttgtgtctgaggacttcctccaggacgtctccgcctccaccaagagccttcaggagttgttcttagcgcacatcttgtccccttggggggcagaggtgaaggcagagcctgttgaagttgtggccccaagagggaagtcaggggctgcgctctccaaaaaaagcaagggccaggtcaaggaggaaggtatcaacaaatctgaaaagagaatgaaattaactcttaaaggaggagcagctgtggatcctgattctggactggaacactctgcgcatgtcctggagaaaggtgggaaggtcttcagtgccacccttggcctggtggacatcgttaaaggaaccaactcctactacaagctgcagcttctggaggacgacaaggaaaacaggtattggatattcaggtcctggggccgtgtgggtacggtgatcggtagcaacaaactggaacagatgccgtccaaggaggatgccattgagcacttcatgaaattatatgaagaaaaaaccgggaacgcttggcactccaaaaatttcacgaagtatcccaaaaagttctaccccctggagattgactatggccaggatgaagaggcagtgaagaagctgacagtaaatcctggcaccaagtccaagctccccaagccagttcaggacctcatcaagatgatctttgatgtggaaagtatgaagaaagccatggtggagtatgagatcgaccttcagaagatgcccttggggaagctgagcaaaaggcagatccaggccgcatactccatcctcagtgaggtccagcaggcggtgtctcagggcagcagcgactctcagatcctggatctctcaaatcgcttttacaccctgatcccccacgactttgggatgaagaagcctccgctcctgaacaatgcagacagtgtgcaggccaaggtggaaatgcttgacaacctgctggacatcgaggtggcctacagtctgctcaggggagggtctgatgatagcagcaaggatcccatcgatgtcaactatgagaagctcaaaactgacattaaggtggttgacagagattctgaagaagccgagatcatcaggaattatgttaagaacactcatgcaaccacacacaatgcgtatgacttggaagtcatcgatatctttaagatagagcgtgaaggcgaatgccagcgttacaagccctttaagcagcttcataaccgaagattgctgtggcacgggtccaggaccaccaactttgctgggatcctgtcccagggtcttcggatagccccgcctgaagcgcccgtgacaggctacatgtttggtaaagggatctatttcgctgacatggtctccaagagtgccaactactgccatacgtctcagggagacccaataggcttaatcctgttgggagaagttgcccttggaaacatgtatgaactgaagcacgcttcacatatcagcaagttacccaagggcaagcacagtgtcaaaggtttgggcaaaactacccctgatccttcagctaacattagtctggatggtgtagacgttcctcttgggaccgggatttcatctggtgtgaatgacacctctctactatataacgagtacattgtctatgatattgctcaggtaaatctgaagtatctgctgaaactgaaattcaattttaagacctccctgtggtaattgggagaggtagccgagtcacacccggtggctctggtatgaattcacccgaagcgcttctgcaccaactcacctggccgctaagttgctgatgggtagtacctgtactaaaccacctcagaaaggattttacagaaacgtgttaaaggttttctctaacttctcaagtcccttgttttgtgttgtgtctgtggggaggggttgttttggggttgtttttgttttttt

SEQ ID NO: 136 - DNA, 1771 bp, Homo sapiens
  source 1..1771: mol_type = genomic DNA
aagaagatggaggaagtaaaggaagccaacatccgagttgtgtctgaggacttcctccaggacgtctccgcctccaccaagagccttcaggagttgttcttagcgcacatcttgtccccttggggggcagaggtgaaggcagagcctgttgaagttgtggccccaagagggaagtcaggggctgcgctctccaaaaaaagcaagggccaggtcaaggaggaaggtatcaacaaatctgaaaagagaatgaaattaactcttaaaggaggagcagctgtggatcctgattctggactggaacactctgcgcatgtcctggagaaaggtgggaaggtcttcagtgccacccttggcctggtggacatcgttaaaggaaccaactcctactacaagctgcagcttctggaggacgacaaggaaaacaggtattggatattcaggtcctggggccgtgtgggtacggtgatcggtagcaacaaactggaacagatgccgtccaaggaggatgccaatgagcacttcatgaaattatatgaagaaaaaaccgggaacgcttggcactccaaaaatttcacgaagtatcccaaaaagttctaccccctggagattgactatggccaggatgaagaggcagtgaagaagctgacagtaaatcctggcaccaagtccaagctccccaagccagttcaggacctcatcaagatgatctttgatgtggaaagtatgaagaaagccatggtggagtatgagatcgaccttcagaagatgcccttggggaagctgagcaaaaggcagatccaggccgcatactccatcctcagtgaggtccagcaggcggtgtctcagggcagcagcgactctcagatcctggatctctcaaatcgcttttacaccctgatcccccacgactttgggatgaagaagcctccgctcctgaacaatgcagacagtgtgcaggccaaggtggaaatgcttgacaacctgctggacatcgaggtggcctacagtctgctcaggggagggtctgatgatagcagcaaggatcccatcgatgtcaactatgagaagctcaaaactgacattaaggtggttgacagagattctgaagaagccgagatcatcaggaagtatgttaagaacactcatgcaaccacacacaatgcgtatgacttggaagtcatcgatatctttaagatagagcgtgaaggcgaatgccagcgttacaagccctttaagcagcttcataaccgaagattgctgtggcacgggtccaggaccaccaactttgctgggatcctgtcccagggtcttcggatagccccgcctgaagcgcccgtgacaggctacatgtttggtaaagggatctatttcgctgacatggtctccaagagtgccaactactgccatacgtctcagggagacccaataggcttaatcctgttgggagaagttgcccttggaaacatgtatgaactgaagcacgcttcacatatcagcaagttacccaagggcaagcacagtgtcaaaggtttgggcaaaactacccctgatccttcagctaacattagtctggatggtgtagacgttcctcttgggaccgggatttcatctggtgtgaatgacacctctctactatataacgagtacattgtctatgatattgctcaggtaaatctgaagtatctgctgaaactgaaattcaattttaagacctccctgtggtaattgggagaggtagccgagtcacacccggtggctctggtatgaattc

SEQ ID NO: 137 - DNA, 3132 bp, Homo sapiens
  source 1..3132: mol_type = genomic DNA
ggtgagcgcacgcgaggcggcgaggcggcagcgtgtttctaggtcgtggcgtcgggcttccggagctttggcggcagctaggggaggatggcggagtcttcggataagctctatcgagtcgagtacgccaagagcgggcgcgcctcttgcaagaaatgcagcgagagcatccccaaggactcgctccggatggccatcatggtgcagtcgcccatgtttgatggaaaagtcccacactggtaccacttctcctgcttctggaaggtgggccactccatccggcaccctgacgttgaggtggatgggttctctgagcttcggtgggatgaccagcagaaagtcaagaagacagcggaagctggaggagtgacaggcaaaggccaggatggaattggtagcaaggcagagaagactctgggtgactttgcagcagagtatgccaagtccaacagaagtacgtgcaaggggtgtatggagaagatagaaaagggccaggtgcgcctgtccaagaagatggtggacccggagaagccacagctaggcatgattgaccgctggtaccatccaggctgctttgtcaagaacagggaggagctgggtttccggcccgagtacagtgcgagtcagctcaagggcttcagcctccttgctacagaggataaagaagccctgaagaagcagctcccaggagtcaagagtgaaggaaagagaaaaggcgatgaggtggatggagtggatgaagtggcgaagaagaaatctaaaaaagaaaaagacaaggatagtaagcttgaaaaagccctaaaggctcagaacgacctgatctggaacatcaaggacgagctaaagaaagtgtgttcaactaatgacctgaaggagctactcatcttcaacaagcagcaagtgccttctggggagtcggcgatcttggaccgagtagctgatggcatggtgttcggtgccctccttccctgcgaggaatgctcgggtcagctggtcttcaagagcgatgcctattactgcactggggacgtcactgcctggaccaagtgtatggtcaagacacagacacccaaccggaaggagtgggtaaccccaaaggaattccgagaaatctcttacctcaagaaattgaaggttaaaaagcaggaccgtatattccccccagaaaccagcgcctccgtggcggccacgcctccgccctccacagcctcggctcctgctgctgtgaactcctctgcttcagcagataagccattatccaacatgaagatcctgactctcgggaagctgtcccggaacaaggatgaagtgaaggccatgattgagaaactcggggggaagttgacggggacggccaacaaggcttccctgtgcagcagcaccaaaaaggaggtggaaaagatgaataagaagatggaggaagtaaaggaagccaacatccgagttgtgtctgaggacttcctccaggacgtctccgcctccaccaagagccttcaggagttgttcttagcgcacatcttgtccccttggggggcagaggtgaaggcagagcctgttgaagttgtggccccaagagggaagtcaggggctgcgctctccaaaaaaagcaagggccaggtcaaggaggaaggtatcaacaaatctgaaaagagaatgaaattaactcttaaaggaggagcagctgtggatcctgattctggactggaacactctgcgcatgtcctggagaaaggtgggaaggtcttcagtgccacccttggcctggtggacatcgttaaaggaaccaactcctactacaagctgcagcttctggaggacgacaaggaaaacaggtattggatattcaggtcctggggccgtgtgggtacggtgatcggtagcaacaaactggaacagatgccgtccaaggaggatgccattgagcacttcatgaaattatatgaagaaaaaaccgggaacgcttggcactccaaaaatttcacgaagtatcccaaaaggttctaccccctggagattgactatggccaggatgaagaggcagtgaagaagctgacagtaaatcctggcaccaagtccaagctccccaagccagttcaggacctcatcaagatgatctttgatgtggaaagtatgaagaaagccatggtggagtatgagatcgaccttcagaagatgcccttggggaagctgagcaaaaggcagatccaggccgcatactccatcctcagtgaggtccagcaggcggtgtctcagggcagcagcgactctcagatcctggatctctcaaatcgcttttacaccctgatcccccacgactttgggatgaagaagcctccgctcctgaacaatgcagacagtgtgcaggccaaggtggaaatgcttgacaacctgctggacatcgaggtggcctacagtctgctcaggggagggtctgatgatagcagcaaggatcccatcgatgtcaactatgagaagctcaaaactgacattaaggtggttgacagagattctgaagaagccgagatcatcaggaagtatgttaagaacactcatgcaaccacacacaatgcgtatgacttggaagtcatcgatatctttaagatagagcgtgaaggcgaatgccagcgttacaagccctttaagcagcttcataaccgaagattgctgtggcacgggtccaggaccaccaactttgctgggatcctgtcccagggtcttcggatagccccgcctgaagcgcccgtgacaggctacatgtttggtaaagggatctatttcgctgacatggtctccaagagtgccaactactgccatacgtctcagggagacccaataggcttaatcctgttgggagaagttgcccttggaaacatgtatgaactgaagcacgcttcacatatcagcaagttacccaagggcaagcacagtgtcaaaggtttgggcaaaactacccctgatccttcagctaacattagtctggatggtgtagacgttcctcttgggaccgggatttcatctggtgtgaatgacacctctctactatataacgagtacattgtctatgatattgctcaggtaaatctgaagtatctgctgaaactgaaattcaattttaagacctccctgtggtaa

SEQ ID NO: 138 - DNA, 827 bp, Homo sapiens
  source 1..827: mol_type = genomic DNA
ggcgtgttcggtggcggctctggccgctcaggcgcctgcggctgggtgagcgcacgcgaggcggcgaggcggcagcgtgtttctaggtcgtggcgtcgggcttccggagctttggcggcagctaggggaggatggcggagtcttcggataagctctatcgagtcgagtacgccaagagcgggcgcgcctcttgcaagaaatgcagcgagagcatccccaaggactcgctccggatggccatcatggtgcagtcgcccatgtttgatggaaaagtcccacactggtaccacttctcctgcttctggaaggtgggccactccatccggcaccctgacgttgaggtggatgggttctctgagcttcggtgggatgaccagcagaaagtcaagaagacagcggaagctggaggagtgacaggcaaaggccaggatggaattggtagcaaggcagagaagactctgggtgactttgcagcagagtatgccaagtccaacagaagtacgtgcaaggggtgtatggagaagatagaaaagggccaggtgcgcctgtccaagaagatggtggacccggagaagccacagctaggcatgattgaccgctggtaccatccaggctgctttgtcaagaacagggaggagctgggtttccggcccgagtacagtgcgagtcagctcaagggcttcagcctccttgctacagaggataaagaagccctgaagaagcagctcccaggagtcaagagtgaaggaaagagaaaaggcgatgaggtggatggagtggatgaagtggcgaagaagaaatctaaaaaaaaaaaaaaaaaaaaaaaa

SEQ ID NO: 139 - DNA, 902 bp, Homo sapiens
  source 1..902: mol_type = genomic DNA
gaacggcggtggccggtgcggcgtgttcggtggcggctctggccgctcaggcgcctgcggctgggtgagcgcacgcgaggcggcgaggcggcagcgtgtttctaggtcgtggcgtcgggcttccggagctttggcggcagctaggggaggatggcggagtcttcggataagctctatcgagtcgagtacgccaagagcgggcgcgcctcttgcaagaaatgcagcgagagcatccccaaggactcgctccggatggccatcatggtgcagtcgcccatgtttgatggaaaagtcccacactggtaccacttctcctgcttctggaaggtgggccactccatccggcaccctgacgttgaggtggatgggttctctgagcttcggtgggatgaccagcagaaagtcaagaagacagcggaagctggaggagtgacaggcaaaggccaggatggaattggtagcaaggcagagaagactctgggtgactttgcagcagagtatgccaagtccaacagaagtacgtgcaaggggtgtatggagaagatagaaaagggccaggtgcgcctgtccaagaagatggtggacccggagaagccacagctaggcatgattgaccgctggtaccatccaggctgctttgtcaagaacagggaggagctgggtttccggcccgagtacagtgcgagtcagctcaagggcttcagcctccttgctacagaggataaagaagccctgaagaagcagctcccaggagtcaagagtgaaggaaagagaaaaggcgatgaggtggatggagtggatgaagtggcgaagaagaaatctaaaaaaaaaaaaaaaaaaaaaaaaaaaaaaaaaaaaaaaaaaaaaaaaaaaaaaaaaaaaaaaaaaaaaaaaaaaaaaaa

SEQ ID NO: 140 - DNA, 553 bp, Homo sapiens
  source 1..553: mol_type = genomic DNA
ggcggtggccggtgcggcgtgttcggtggcggctctggccgctcaggcgcctgcggctgggtgagcgcacgcgaggcggcgaggcggcagcgtgtttctaggtcgtggcgtcgggcttccggagctttggcggcagctaggggaggatggcggagtcttcggataagctctatcgagtcgagtacgccaagagcgggcgcgcctcttgcaagaaatgcagcgagagcatccccaaggactcgctccggatggccatcatggtgcagtcgcccatgtttgatggaaaagtcccacactggtaccacttctcctgcttctggaaggtgggccactccatccggcaccctgacgttgaggtggatgggttctctgagcttcggtgggatgaccagcagaaagtcaagaagacagcggaagctggaggagtgacagaacctccaataccatgtggaatagaagtgatgggaagatagcttcgtcttattcctaatcttaggcaaaggccaggatggaattggtagcaaggcagagaagactctgggtgactttgcag

SEQ ID NO: 141 - DNA, 477 bp, Homo sapiens
  source 1..477: mol_type = genomic DNA
gaacggcggtggccggtgcggcgtgttcggtggcggctctggccgctcaggcgcctgcggctgggtgagcgcacgcgaggcggcgaggcggcagcgtgtttctaggtcgtggcgtcgggcttccggagctttggcggcagctaggggaggatggcggagtcttcggataagctctatcgagtcgagtacgccaagagcgggcgcgcctcttgcaagaaatgcagcgagagcatccccaaggactcgctccggatggccatcatggtgcagtcgcccatgtttgatggaaaagtcccacactggtaccacttctcctgcttctggaaggtgggccactccatccggcaccctgacgttgaggtggatgggttctctgagcttcggtgggatgaccagcagaaagtcaagaagacagcggaagctggaggagtgacagaacctccaataccatgtggaatagaagtgatgggaagatag

SEQ ID NO: 142 - DNA, 570 bp, Homo sapiens
  source 1..570: mol_type = genomic DNA
gtttctaggtcgtggcgtcgggcttccggagctttggcggcagctaggggaggatggcggagtcttcggataagctctatcgagtcgagtacgccaagagcgggcgcgcctcttgcaagaaatgcagcgagagcatccccaaggactcgctccggatggccatcatggtgcagtcgcccatgtttgatggaaaagtcccacactggtaccacttctcctgcttctggaaggtgggccactccatccggcaccctgacgttgaggtggatgggttctctgagcttcggtgggatgaccagcagaaagtcaagaagacagcggaagctggaggagtgacaggtgtgtacatactggggcagcatgggcattcagcccccaccctgaagctcccaggagggcctcgtctcagagagcaaagcaaacctcccccagcttgccctctcccacatgtgcagatcaagcgtatggtgcccatgttatttcagcaacacctcctggactcagcatcatctgttgcatgatatttggtattttgtttttccaggtgcttggaatgtagcctttaaagtt

SEQ ID NO: 143 - DNA, 3958 bp, Homo sapiens
  source 1..3958: mol_type = genomic DNA
cggtggccggtgcggcgtgttcggtggcggctctggccgctcaggcgcctgcggctgggtgagcgcacgcgaggcggcgaggcggcagcgtgtttctaggtcgtggcgtcgggcttccggagctttggcggcagctaggggaggatggcggagtcttcggataagctctatcgagtcgagtacgccaagagcgggcgcgcctcttgcaagaaatgcagcgagagcatccccaaggactcgctccggatggccatcatggtgcagtcgcccatgtttgatggaaaagtcccacactggtaccacttctcctgcttctggaaggtgggccactccatccggcaccctgacgttgaggtggatgggttctctgagcttcggtgggatgaccagcagaaagtcaagaagacagcggaagctggaggagtgacaggcaaaggccaggatggaattggtagcaaggcagagaagactctgggtgactttgcagcagagtatgccaagtccaacagaagtacgtgcaaggggtgtatggagaagatagaaaagggccaggtgcgcctgtccaagaagatggtggacccggagaagccacagctaggcatgattgaccgctggtaccatccaggctgctttgtcaagaacagggaggagctgggtttccggcccgagtacagtgcgagtcagctcaagggcttcagcctccttgctacagaggataaagaagccctgaagaagcagctcccaggagtcaagagtgaaggaaagagaaaaggcgatgaggtggatggagtggatgaagtggcgaagaagaaatctaaaaaagaaaaagacaaggatagtaagcttgaaaaagccctaaaggctcagaacgacctgatctggaacatcaaggacgagctaaagaaagtgtgttcaactaatgacctgaaggagctactcatcttcaacaagcagcaagtgccttctggggagtcggcgatcttggaccgagtagctgatggcatggtgttcggtgccctccttccctgcgaggaatgctcgggtcagctggtcttcaagagcgatgcctattactgcactggggacgtcactgcctggaccaagtgtatggtcaagacacagacacccaaccggaaggagtgggtaaccccaaaggaattccgagaaatctcttacctcaagaaattgaaggttaaaaaacaggaccgtatattccccccagaaaccagcgcctccgtggcggccacgcctccgccctccacagcctcggctcctgctgctgtgaactcctctgcttcagcagataagccattatccaacatgaagatcctgactctcgggaagctgtcccggaacaaggatgaagtgaaggccatgattgagaaactcggggggaagttgacggggacggccaacaaggcttccctgtgcatcagcaccaaaaaggaggtggaaaagatgaataagaagatggaggaagtaaaggaagccaacatccgagttgtgtctgaggacttcctccaggacgtctccgcctccaccaagagccttcaggagttgttcttagcgcacatcttgtccccttggggggcagaggtgaaggcagagcctgttgaagttgtggccccaagagggaagtcaggggctgcgctctccaaaaaaagcaagggccaggtcaaggaggaaggtatcaacaaatctgaaaagagaatgaaattaactcttaaaggaggagcagctgtggatcctgattctggactggaacactctgcgcatgtcctggagaaaggtgggaaggtcttcagtgccacccttggcctggtggacatcgttaaaggaaccaactcctactacaagctgcagcttctggaggacgacaaggaaaacaggtattggatattcaggtcctggggccgtgtgggtacggtgatcggtagcaacaaactggaacagatgccgtccaaggaggatgccattgagcacttcatgaaattatatgaagaaaaaaccgggaacgcttggcactccaaaaatttcacgaagtatcccaaaaagttctaccccctggagattgactatggccaggatgaagaggcagtgaagaagctgacagtaaatcctggcaccaagtccaagctccccaagccagttcaggacctcatcaagatgatctttgatgtggaaagtatgaagaaagccatggtggagtatgagatcgaccttcagaagatgcccttggggaagctgagcaaaaggcagatccaggccgcatactccatcctcagtgaggtccagcaggcggtgtctcagggcagcagcgactctcagatcctggatctctcaaatcgcttttacaccctgatcccccacgactttgggatgaagaagcctccgctcctgaacaatgcagacagtgtgcaggccaaggtggaaatgcttgacaacctgctggacatcgaggtggcctacagtctgctcaggggagggtctgatgatagcagcaaggatcccatcgatgtcaactatgagaagctcaaaactgacattaaggtggttgacagagattctgaagaagccgagatcatcaggaagtatgttaagaacactcatgcaaccacacacaatgcgtatgacttggaagtcatcgatatctttaagatagagcgtgaaggcgaatgccagcgttacaagccctttaagcagcttcataaccgaagattgctgtggcacgggtccaggaccaccaactttgctgggatcctgtcccagggtcttcggatagccccgcctgaagcgcccgtgacaggctacatgtttggtaaagggatctatttcgctgacatggtctccaagagtgccaactactgccatacgtctcagggagacccaataggcttaatcctgttgggagaagttgcccttggaaacatgtatgaactgaagcacgcttcacatatcagcaagttacccaagggcaagcacagtgtcaaaggtttgggcaaaactacccctgatccttcagctaacattagtctggatggtgtagacgttcctcttgggaccgggatttcatctggtgtgaatgacacctctctactatataacgagtacattgtctatgatattgctcaggtaaatctgaagtatctgctgaaactgaaattcaattttaagacctccctgtggtaattgggagaggtagccgagtcacacccggtggctctggtatgaattcacccgaagcgcttctgcaccaactcacctggccgctaagttgctgatgggtagtacctgtactaaaccacctcagaaaggattttacagaaacgtgttaaaggttttctctaacttctcaagtcccttgttttgtgttgtgtctgtggggaggggttgttttggggttgtttttgttttttcttgccaggtagataaaactgacatagagaaaaggctggagagagattctgttgcatagactagtcctatggaaaaaaccaagcttcgttagaatgtctgccttactggtttccccagggaaggaaaaatacacttccacccttttttctaagtgttcgtctttagttttgattttggaaagatgttaagcatttatttttagttaaaaataaaaactaatttcatactatttagattttcttttttatcttgcacttattgtcccctttttagttttttttgtttgcctcttgtggtgaggggtgtgggaagaccaaaggaaggaacgctaacaatttctcatacttagaaacaaaaagagctttccttctccaggaatactgaacatgggagctcttgaaatatgtagtattaaaagttgcatttgaaattcttgactttcttatgggcacttttgtcttccaaattaaaactctaccacaaatatacttacccaagggctaatagtaatactcgattaaaaatgcagatgccttctcta

SEQ ID NO: 144 - protein, 1014 aa, Homo sapiens
MAESSDKLYRVEYAKSGRASCKKCSESIPKDSLRMAIMVQSPMFDGKVPHWYHFSCFWKVGHSIRHPDVEVDGFSELRWDDQQKVKKTAEAGGVTGKGQDGIGSKAEKTLGDFAAEYAKSNRSTCKGCMEKIEKGQVRLSKKMVDPEKPQLGMIDRWYHPGCFVKNREELGFRPEYSASQLKGFSLLATEDKEALKKQLPGVKSEGKRKGDEVDGVDEVAKKKSKKEKDKDSKLEKALKAQNDLIWNIKDELKKVCSTNDLKELLIFNKQQVPSGESAILDRVADGMVFGALLPCEECSGQLVFKSDAYYCTGDVTAWTKCMVKTQTPNRKEWVTPKEFREISYLKKLKVKKQDRIFPPETSASVAATPPPSTASAPAAVNSSASADKPLSNMKILTLGKLSRNKDEVKAMIEKLGGKLTGTANKASLCISTKKEVEKMNKKMEEVKEANIRVVSEDFLQDVSASTKSLQELFLAHILSPWGAEVKAEPVEVVAPRGKSGAALSKKSKGQVKEEGINKSEKRMKLTLKGGAAVDPDSGLEHSAHVLEKGGKVFSATLGLVDIVKGTNSYYKLQLLEDDKENRYWIFRSWGRVGTVIGSNKLEQMPSKEDAIEHFMKLYEEKTGNAWHSKNFTKYPKKFYPLEIDYGQDEEAVKKLTVNPGTKSKLPKPVQDLIKMIFDVESMKKAMVEYEIDLQKMPLGKLSKRQIQAAYSILSEVQQAVSQGSSDSQILDLSNRFYTLIPHDFGMKKPPLLNNADSVQAKVEMLDNLLDIEVAYSLLRGGSDDSSKDPIDVNYEKLKTDIKVVDRDSEEAEIIRKYVKNTHATTHNAYDLEVIDIFKIEREGECQRYKPFKQLHNRRLLWHGSRTTNFAGILSQGLRIAPPEAPVTGYMFGKGIYFADMVSKSANYCHTSQGDPIGLILLGEVALGNMYELKHASHISKLPKGKHSVKGLGKTTPDPSANISLDGVDVPLGTGISSGVNDTSLLYNEYIVYDIAQVNLKYLLKLKFNFKTSLW

SEQ ID NO: 145 - protein, 971 aa, Homo sapiens
MAESSDKLYRVEYAKSGRASCKKCSESIPKDSLRMAIMVQSPMFDGKVPHWYHFSCFWKVGHSIRHPDVEVDGFSELRWDDQQKVKKTAEAGGVTGKGQDGIGSKAEKTLGDFAAEYAKSNRSTCKGCMEKIEKGQVRLSKKMVDPEKPQLGMIDRWYHPGCFVKNREELGFRPEYSASQLKGFSLLATEDKEALKKQLPGVKSEGKRKGDEVDGVDEVAKKKSKKEKDKDSKLEKALKAQNDLIWNIKDELKKVCSTNDLKELLIFNKQQVPSGESAILDRVADGMVFGALLPCEECSGQLVFKSDAYYCTGDVTAWTKCMVKTQTPNRKEWVTPKEFREISYLKKLKVKKQDRIFPPETSASVAATPPPSTASAPAAVNSSASADKPLSNMKILTLGKLSRNKDEVKAMIEKLGGKLTGTANKASLCISTKKEVEKMNKKMEEVKEANIRVVSEDFLQDVSASTKSLQELFLAHILSPWGAEVKAEPVEVVAPRGKSGAALSKKSKGQVKEEGINKSEKRMKLTLKGGAAVDPDSGLEHSAHVLEKGGKVFSATLGLVDIVKGTNSYYKLQLLEDDKENRYWIFRSWGRVGTVIGSNKLEQMPSKEDAIEHFMKLYEEKTGNAWHSKNFTKYPKKFYPLEIDYGQIDLQKMPLGKLSKRQIQAAYSILSEVQQAVSQGSSDSQILDLSNRFYTLIPHDFGMKKPPLLNNADSVQAKVEMLDNLLDIEVAYSLLRGGSDDSSKDPIDVNYEKLKTDIKVVDRDSEEAEIIRKYVKNTHATTHNAYDLEVIDIFKIEREGECQRYKPFKQLHNRRLLWHGSRTTNFAGILSQGLRIAPPEAPVTGYMFGKGIYFADMVSKSANYCHTSQGDPIGLILLGEVALGNMYELKHASHISKLPKGKHSVKGLGKTTPDPSANISLDGVDVPLGTGISSGVNDTSLLYNEYIVYDIAQVNLKYLLKLKFNFKTSLW

SEQ ID NO: 146 - protein, 993 aa, Homo sapiens [sequence omitted]

SEQ ID NO: 147 - protein, 574 aa, Homo sapiens
KKMEEVKEANIRVVSEDFLQDVSASTKSLQELFLAHILSPWGAEVKAEPVEVVAPRGKSGAALSKKSKGQVKEEGINKSEKRMKLTLKGGAAVDPDSGLEHSAHVLEKGGKVFSATLGLVDIVKGTNSYYKLQLLEDDKENRYWIFRSWGRVGTVIGSNKLEQMPSKEDANEHFMKLYEEKTGNAWHSKNFTKYPKKFYPLEIDYGQDEEAVKKLTVNPGTKSKLPKPVQDLIKMIFDVESMKKAMVEYEIDLQKMPLGKLSKRQIQAAYSILSEVQQAVSQGSSDSQILDLSNRFYTLIPHDFGMKKPPLLNNADSVQAKVEMLDNLLDIEVAYSLLRGGSDDSSKDPIDVNYEKLKTDIKVVDRDSEEAEIIRKYVKNTHATTHNAYDLEVIDIFKIEREGECQRYKPFKQLHNRRLLWHGSRTTNFAGILSQGLRIAPPEAPVTGYMFGKGIYFADMVSKSANYCHTSQGDPIGLILLGEVALGNMYELKHASHISKLPKGKHSVKGLGKTTPDPSANISLDGVDVPLGTGISSGVNDTSLLYNEYIVYDIAQVNLKYLLKLKFNFKTSLW

SEQ ID NO: 148 - protein, 232 aa, Homo sapiens
MAESSDKLYRVEYAKSGRASCKKCSESIPKDSLRMAIMVQSPMFDGKVPHWYHFSCFWKVGHSIRHPDVEVDGFSELRWDDQQKVKKTAEAGGVTGKGQDGIGSKAEKTLGDFAAEYAKSNRSTCKGCMEKIEKGQVRLSKKMVDPEKPQLGMIDRWYHPGCFVKNREELGFRPEYSASQLKGFSLLATEDKEALKKQLPGVKSEGKRKGDEVDGVDEVAKKKSKKKKKKKK

SEQ ID NO: 149 - protein, 250 aa, Homo sapiens
MAESSDKLYRVEYAKSGRASCKKCSESIPKDSLRMAIMVQSPMFDGKVPHWYHFSCFWKVGHSIRHPDVEVDGFSELRWDDQQKVKKTAEAGGVTGKGQDGIGSKAEKTLGDFAAEYAKSNRSTCKGCMEKIEKGQVRLSKKMVDPEKPQLGMIDRWYHPGCFVKNREELGFRPEYSASQLKGFSLLATEDKEALKKQLPGVKSEGKRKGDEVDGVDEVAKKKSKKKKKKKKKKKKKKKKKKKKKKKKKK

SEQ ID NO: 150 - protein, 108 aa, Homo sapiens
MAESSDKLYRVEYAKSGRASCKKCSESIPKDSLRMAIMVQSPMFDGKVPHWYHFSCFWKVGHSIRHPDVEVDGFSELRWDDQQKVKKTAEAGGVTEPPIPCGIEVMGR

SEQ ID NO: 151 - protein, 155 aa, Homo sapiens
MAESSDKLYRVEYAKSGRASCKKCSESIPKDSLRMAIMVQSPMFDGKVPHWYHFSCFWKVGHSIRHPDVEVDGFSELRWDDQQKVKKTAEAGGVTGVYILGQHGHSAPTLKLPGGPRLREQSKPPPACPLPHVQIKRMVPMLFQQHLLDSASSVA

SEQ ID NO: 152 - DNA, 20 bp, synthetic construct
  misc_feature 1..20: note = Synthetic sequence; gRNA Recognition Sequence
  source 1..20: mol_type = other DNA
ggtggataagaattagcgag

SEQ ID NO: 153 - DNA, 20 bp, synthetic construct
  misc_feature 1..20: note = Synthetic sequence; gRNA Recognition Sequence
  source 1..20: mol_type = other DNA
gtggaaagtccaatcatgtg

SEQ ID NO: 154 - DNA, 20 bp, synthetic construct
  misc_feature 1..20: note = Synthetic sequence; gRNA Recognition Sequence
  source 1..20: mol_type = other DNA
tatgaatatgaccgaaagtg

SEQ ID NO: 155 - DNA, 20 bp, synthetic construct
  misc_feature 1..20: note = Synthetic sequence; gRNA Recognition Sequence
  source 1..20: mol_type = other DNA
gagtataactgggcaactgt

SEQ ID NO: 156 - DNA, 20 bp, synthetic construct
  misc_feature 1..20: note = Synthetic sequence; gRNA Recognition Sequence
  source 1..20: mol_type = other DNA
tgtgtagtattagacactga

SEQ ID NO: 157 - DNA, 20 bp, synthetic construct
  misc_feature 1..20: note = Synthetic sequence; gRNA Recognition Sequence
  source 1..20: mol_type = other DNA
tgtgagcaccactctctgta

SEQ ID NO: 158 - DNA, 20 bp, synthetic construct
  misc_feature 1..20: note = Synthetic sequence; gRNA Recognition Sequence
  source 1..20: mol_type = other DNA
gaatagtagcaaatagcacc

SEQ ID NO: 159 - DNA, 20 bp, synthetic construct
  misc_feature 1..20: note = Synthetic sequence; gRNA Recognition Sequence
  source 1..20: mol_type = other DNA
gaaaccattaaataatacag

SEQ ID NO: 160 - DNA, 20 bp, synthetic construct
  misc_feature 1..20: note = Synthetic sequence; gRNA Recognition Sequence
  source 1..20: mol_type = other DNA
ggttgagtattagggcacag

SEQ ID NO: 161 - DNA, 20 bp, synthetic construct
  misc_feature 1..20: note = Synthetic sequence; gRNA Recognition Sequence
  source 1..20: mol_type = other DNA
gtgttgagccagattgaaca

SEQ ID NO: 162 - DNA, 20 bp, synthetic construct
  misc_feature 1..20: note = Synthetic sequence; gRNA Recognition Sequence
  source 1..20: mol_type = other DNA
aatcaccgtttactgggacg

SEQ ID NO: 163 - DNA, 20 bp, synthetic construct
  misc_feature 1..20: note = Synthetic sequence; gRNA Recognition Sequence
  source 1..20: mol_type = other DNA
acaccagactggtacaatcc

SEQ ID NO: 164 - DNA, 20 bp, synthetic construct
  misc_feature 1..20: note = Synthetic sequence; gRNA Recognition Sequence
  source 1..20: mol_type = other DNA
acaggggtcatcaggcttag

SEQ ID NO: 165 - DNA, 20 bp, synthetic construct
  misc_feature 1..20: note = Synthetic sequence; gRNA Recognition Sequence
  source 1..20: mol_type = other DNA
gctatactctgctagaggct

SEQ ID NO: 166 - DNA, 20 bp, synthetic construct
  misc_feature 1..20: note = Synthetic sequence; gRNA Recognition Sequence
  source 1..20: mol_type = other DNA
caggtcccatcaattaagaa

SEQ ID NO: 167 - DNA, 20 bp, synthetic construct
  misc_feature 1..20: note = Synthetic sequence; gRNA Recognition Sequence
  source 1..20: mol_type = other DNA
aatcagctatactctgctag

SEQ ID NO: 168 - DNA, 20 bp, synthetic construct
  misc_feature 1..20: note = Synthetic sequence; gRNA Recognition Sequence
  source 1..20: mol_type = other DNA
cagctggagccacctatagt

SEQ ID NO: 169 - DNA, 20 bp, synthetic construct
  misc_feature 1..20: note = Synthetic sequence; gRNA Recognition Sequence
  source 1..20: mol_type = other DNA
ttcacagatgaagggcaact

SEQ ID NO: 170 - DNA, 20 bp, synthetic construct
  misc_feature 1..20: note = Synthetic sequence; gRNA Recognition Sequence
  source 1..20: mol_type = other DNA
gccaggatccttgtaaatct

SEQ ID NO: 171 - DNA, 20 bp, synthetic construct
  misc_feature 1..20: note = Synthetic sequence; gRNA Recognition Sequence
  source 1..20: mol_type = other DNA
ctcacatttccaccacagca

SEQ ID NO: 172 - DNA, 20 bp, synthetic construct
  misc_feature 1..20: note = Synthetic sequence; gRNA Recognition Sequence
  source 1..20: mol_type = other DNA
ctgggtcgtgttcttgtccg

SEQ ID NO: 173 - DNA, 20 bp, synthetic construct
  misc_feature 1..20: note = Synthetic sequence; gRNA Recognition Sequence
  source 1..20: mol_type = other DNA
aactccccagaaacctgtga

SEQ ID NO: 174 - DNA, 20 bp, synthetic construct
  misc_feature 1..20: note = Synthetic sequence; gRNA Recognition Sequence
  source 1..20: mol_type = other DNA
caccggcgccgaggttacgt

SEQ ID NO: 175 - DNA, 20 bp, synthetic construct
  misc_feature 1..20: note = Synthetic sequence; gRNA Recognition Sequence
  source 1..20: mol_type = other DNA
acagttagtgattgtcaagt

SEQ ID NO: 176 - DNA, 20 bp, synthetic construct
  misc_feature 1..20: note = Synthetic sequence; gRNA Recognition Sequence
  source 1..20: mol_type = other DNA
gcccatctccaacgtaacct

SEQ ID NO: 177 - DNA, 20 bp, synthetic construct
  misc_feature 1..20: note = Synthetic sequence; gRNA Recognition Sequence
  source 1..20: mol_type = other DNA
cagttagtgattgtcaagtg

SEQ ID NO: 178 - DNA, 20 bp, synthetic construct
  misc_feature 1..20: note = Synthetic sequence; gRNA Recognition Sequence
  source 1..20: mol_type = other DNA
accagcgggagggacgtcac

SEQ ID NO: 179 - DNA, 20 bp, synthetic construct
  misc_feature 1..20: note = Synthetic sequence; gRNA Recognition Sequence
  source 1..20: mol_type = other DNA
ggtgccggagtggtgaccag

SEQ ID NO: 180 - DNA, 20 bp, synthetic construct
  misc_feature 1..20: note = Synthetic sequence; gRNA Recognition Sequence
  source 1..20: mol_type = other DNA
ctccaacgtaacctcggcgc

SEQ ID NO: 181 - DNA, 20 bp, synthetic construct
  misc_feature 1..20: note = Synthetic sequence; gRNA Recognition Sequence
  source 1..20: mol_type = other DNA
gtgccaacagccaattctac

SEQ ID NO: 182 - DNA, 20 bp, synthetic construct
  misc_feature 1..20: note = Synthetic sequence; gRNA Recognition Sequence
  source 1..20: mol_type = other DNA
cctcccgctggtcaccactc

SEQ ID NO: 183 - DNA, 20 bp, synthetic construct
  misc_feature 1..20: note = Synthetic sequence; gRNA Recognition Sequence
  source 1..20: mol_type = other DNA
tcgaccttcacaggtttctg

SEQ ID NO: 184 - DNA, 20 bp, synthetic construct
  misc_feature 1..20: note = Synthetic sequence; gRNA Recognition Sequence
  source 1..20: mol_type = other DNA
aacagttagtgattgtcaag

SEQ ID NO: 185 - DNA, 20 bp, synthetic construct
  misc_feature 1..20: note = Synthetic sequence; gRNA Recognition Sequence
  source 1..20: mol_type = other DNA
gccgaggttacgttggagat

SEQ ID NO: 186 - DNA, 20 bp, synthetic construct
  misc_feature 1..20: note = Synthetic sequence; gRNA Recognition Sequence
  source 1..20: mol_type = other DNA
gcagctgtttcgaccttcac

SEQ ID NO: 187 - DNA, 20 bp, synthetic construct
  misc_feature 1..20: note = Synthetic sequence; gRNA Recognition Sequence
  source 1..20: mol_type = other DNA
gagggacgtcaccggcgccg

SEQ ID NO: 188 - DNA, 20 bp, synthetic construct
  misc_feature 1..20: note = Synthetic sequence; gRNA Recognition Sequence
  source 1..20: mol_type = other DNA
agtcgtcacgttcgggtgct

SEQ ID NO: 189 - DNA, 20 bp, synthetic construct
  misc_feature 1..20: note = Synthetic sequence; gRNA Recognition Sequence
  source 1..20: mol_type = other DNA
aacaacgctaacattaaaac

SEQ ID NO: 190 - DNA, 20 bp, synthetic construct
  misc_feature 1..20: note = Synthetic sequence; gRNA Recognition Sequence
  source 1..20: mol_type = other DNA
gcagagcacgcccaggcagg

SEQ ID NO: 191 - DNA, 20 bp, synthetic construct
  misc_feature 1..20: note = Synthetic sequence; gRNA Recognition Sequence
  source 1..20: mol_type = other DNA
tttacattctatccaaaagc

SEQ ID NO: 192 - DNA, 20 bp, synthetic construct
  misc_feature 1..20: note = Synthetic sequence; gRNA Recognition Sequence
  source 1..20: mol_type = other DNA
taccgatcaccgtacccaca

SEQ ID NO: 193 - DNA, 20 bp, synthetic construct
  misc_feature 1..20: note = Synthetic sequence; gRNA Recognition Sequence
  source 1..20: mol_type = other DNA
aactcggggggaagttgacg

SEQ ID NO: 194 - DNA, 20 bp, synthetic construct
  misc_feature 1..20: note = Synthetic sequence; gRNA Recognition Sequence
  source 1..20: mol_type = other DNA
cgatgcctattactgcactg

SEQ ID NO: 195 - DNA, 20 bp, synthetic construct
  misc_feature 1..20: note = Synthetic sequence; gRNA Recognition Sequence
  source 1..20: mol_type = other DNA
agctaggcatgattgaccgc

SEQ ID NO: 196 - DNA, 20 bp, synthetic construct
  misc_feature 1..20: note = Synthetic sequence; gRNA Recognition Sequence
  source 1..20: mol_type = other DNA
tggccatagtcaatctccag

SEQ ID NO: 197 - DNA, 20 bp, synthetic construct
  misc_feature 1..20: note = Synthetic sequence; gRNA Recognition Sequence
  source 1..20: mol_type = other DNA
aattatatgaagaaaaaacc

SEQ ID NO: 198 - DNA, 20 bp, synthetic construct
  misc_feature 1..20: note = Synthetic sequence; gRNA Recognition Sequence
  source 1..20: mol_type = other DNA
atcttggaccgagtagctga

SEQ ID NO: 199 - DNA, 20 bp, synthetic construct
  misc_feature 1..20: note = Synthetic sequence; gRNA Recognition Sequence
  source 1..20: mol_type = other DNA
gaaggagtgggtaaccccaa

SEQ ID NO: 200 - DNA, 20 bp, synthetic construct
  misc_feature 1..20: note = Synthetic sequence; gRNA Recognition Sequence
  source 1..20: mol_type = other DNA
ggccatagtcaatctccagg

SEQ ID NO: 201 - DNA, 20 bp, synthetic construct
  misc_feature 1..20: note = Synthetic sequence; gRNA Recognition Sequence
  source 1..20: mol_type = other DNA
ctggccatagtcaatctcca

SEQ ID NO: 202 - DNA, 20 bp, synthetic construct
  misc_feature 1..20: note = Synthetic sequence; gRNA Recognition Sequence
  source 1..20: mol_type = other DNA
ggaacagatgccgtccaagg

SEQ ID NO: 203 - DNA, 20 bp, synthetic construct
  misc_feature 1..20: note = Synthetic sequence; gRNA Recognition Sequence
  source 1..20: mol_type = other DNA
gacacagacacccaaccgga

SEQ ID NO: 204 - DNA, 20 bp, synthetic construct
  misc_feature 1..20: note = Synthetic sequence; gRNA Recognition Sequence
  source 1..20: mol_type = other DNA
ggaagtcctcagacacaact

SEQ ID NO: 205 - DNA, 20 bp, synthetic construct
  misc_feature 1..20: note = Synthetic sequence; gRNA Recognition Sequence
  source 1..20: mol_type = other DNA
ggccatgattgagaaactcg

SEQ ID NO: 206 - DNA, 20 bp, synthetic construct
  misc_feature 1..20: note = Synthetic sequence; gRNA Recognition Sequence
  source 1..20: mol_type = other DNA
tccaacagaagtacgtgcaa

SEQ ID NO: 207 - DNA, 20 bp, synthetic construct
  misc_feature 1..20: note = Synthetic sequence; gRNA Recognition Sequence
  source 1..20: mol_type = other DNA
tggccccaagagggaagtca

SEQ ID NO: 208 - DNA, 20 bp, synthetic construct
  misc_feature 1..20: note = Synthetic sequence; gRNA Recognition Sequence
  source 1..20: mol_type = other DNA
catccggcaccctgacgttg

SEQ ID NO: 209 - DNA, 20 bp, synthetic construct
  misc_feature 1..20: note = Synthetic sequence; gRNA Recognition Sequence
  source 1..20: mol_type = other DNA
cccagaaaccagcgcctccg

SEQ ID NO: 210 - DNA, 20 bp, synthetic construct
  misc_feature 1..20: note = Synthetic sequence; gRNA Recognition Sequence
  source 1..20: mol_type = other DNA
aaagagaaaaggcgatgagg

SEQ ID NO: 211 - DNA, 20 bp, synthetic construct
  misc_feature 1..20: note = Synthetic sequence; gRNA Recognition Sequence
  source 1..20: mol_type = other DNA
cctggagattgactatggcc

SEQ ID NO: 212 - DNA, 114736 bp, Homo sapiens
  source 1..114736: mol_type = genomic DNA
gcagtgggctctggcggaggtcgggagaactgcagggcgaaggccgccgggggctccgcgggctgcggggggaggcacttgacaccggcccggggagaggaggggccgctgtccctgcggccagtgctggatgcggggacccagcgcagaagcagcgccaggtagcggggcgcccagcgtggggagggctgcggcgaggcccggagctcggctacgactcgaggggctctgagtggccgggagcgcggccgaggcggggcgcccggggcccggcccccggtctgggcggtgcggggtccagacctccgccaagcggcgtgcggggaccccggcggggccgcagaggccgggaagtcgcgccgagggcgctaggaccggccgcgcgcccaggccgctcccgccgcggcgccccggggccccccagtcggcgctgcctcccgggccggctccgcagcgccggggccggggccagcgcggccgcggggggcgagcggcgggcggaggcctgggcccgcgggcggccggagggagggaaggaggaaggcggagagaaggggtgggagggggggacccggcggaggaggcggagagagggagcgcgacagcgagcggagggagggagcgagcgagcgaggcaggcaggcgggccgggagggagggagggcgcgcgggcggcggcggcggcgagagcagaggacgagccgggacgcggcgccgcggcaccagggcgcgcagccgggccggcccgaccccaccggccatacggtaatgagcgccgctgctggcggcccggaaggccggcccggaggcggcggggagccggggagccgggcggggggcgccgcggctggcagtgcccggctcggggcacgctcccggacccctgcaactcggcgccgggcgcccgtggggccgggactgcaggcggggacggcgggccgggctggccggggcggcgcgggggatttgagggtttgtttatgtccccgcgggctcggcaggcgccccctcccgtcccgcccgctcccggcgcggacccccctccccgcccccgcccggctccgggctcaagttcaagtctatacaatgccgcggggggcccctccaccgccggcctgcgccgcggtgcccggctcgccgctgccgcaggggccccggccgggccgcccccgccttccgggctctgccccagccccgcggccccgcctggagcccgcggccagggcgccggagggcgcggaccccgacccagaaggatcggcccccgcggcggcccgggggagcgggggagggggcgggggccgggccccgcgcaggctccgcggcggcggcagaaaatggcagcctggcacgacccggccccccgcccctccccccggcgcccggccctcctcggccccgcggggcgggggacccgggaggcccccgggggcgggccgaggggtgatggcggggccgggccggggagcgccgcgccgcgatcctcctccggccacctgtggctgggggtgcggggcgccggcggggccgggaggggcggcggggccggggagagcgcccgccttgggggcacaccttcccccggagtgccggcggcacggagaggggtggtcgtgcccggctcctccctgtccccaccgcgggccgtgggtgcccgggcggccgcggtggcggcgccgcaatgtgggggcggggcgggggcgggcgaggatcccgggcccgggcccgggccgcgggggccggaaaacgcgggggtggaagtagcggggccgggaccgggagcggcgcagggggggtacgcccggggtcgcccctccagcacccccgcgcacactcccacgcacgcggacacactcacgcacacgcaccccgccgggccggtgcagacgtgtccttgaaagcttcgcatctgcacagtgaaggacgaggcctcgccgcggctgcggagcggggtcttcggccccacgtccccgcaccccgggagacctcgagcttcggagccgcaggcggcggctgtccgtgtcccgccctcaccccagttcccctcccccaggccgccctgccttccctccccttcggcgcggaccgggctggcgcgggtccagggcccgcccctggcctcccccagcccctcatcgctggggcccgcggccctggggctgccaaactgcttttcgctttcctgaagcctcccttcttgggggcaccctctcccaccccagcgcccctctgccatttctccccctctcctcatcccctccgtcctggcaccctctctccgctgcacggccagttgaggaggtgttggcgccctgggcggggagcagtgccctctggttcccaggggctgcctcccccggctcctgaggggagccccctgcggctgcaccttgacccaacatggcgtctggcacccagcagggcagctctggcctgcggcaggcgggagggtgggcagggccgagccccagggccgcgcagctaccccccctccaaaccagcggggacagaagccttggggagaagcgctgtccgccctgtgacccaacttgcccctcactgccgtgcccagagactgccatcagcatccctgagggcctgctcagtcttcatgtttcaccctaggctgccagcggctgaacccgcctcctgggcgggcggctacgaagggatcctgggatcaggtgctgctccagtgtcgcctcctccctcgcgggcagatgtgacagctgcagccaggggagctattcgccttgctattgcctgggtgttaggactggcctgtgggatttggggggccaggcatcccggggaccctctttggttggctagcaggggccatctccaggtagttttctgagctgcctgcctttggagagttgggttgtagggagttcctgctgggtttctggggcaaaatggtccccctctgcctccaggttctaccgaggccctgcttgggctgtgacaggtggctctgtcaaggtgggagtctgtgtgtgcacatgtgctggctccaggcgagggaccaggctggcctgtgcagcagctctggcacctgcctgcctccctggtgggtccccctcctctgtgcagctcctccccagataagcagctgcggattcaggccgaccaaacttccctcgttaccccacccaggcaccagtgccttccataggagactgaccctaagaaaggtgaattccttctagactcaaggagtggactggtccacagggctgccctctgagtccttcctggagaagcctaggaaaggacgccagcagccatctgtcagggtgtctgcggacaggattcctctgtggggtgggggttggactagagccggaaggtccattccagctttgacattctatggctctgattctagtggtggaatttcaggcctagcaatggggacagggtggtctgtttttcggcacatggcagtaataggggaaggcttccaaggagaaggagatatgagagagatcagggcgcccagcgagttgggccttgggaaggagaggcagtgtgaggagggtccctgcaagagacgggttggtcacgtccgactctgcagagggtgtaaaaagtacagcctcctttaagcctcggcacgtgtgtatcctgtaggtttgtgtataaatccctgtgtgtggataatttctgaggtttccttttcaagtccaattcacagtaagctcctcagtcccttatggatgttttactatcgctttcacacccacctctgccagtggttctcaaaaagctaggaagacaggacaaacggtaaaatccttgtccagggtcaccggcaggaagaagtggagccaggcctgcactcgggggaagatgccccatgctatacctcttacctgggctgctgcatgtgtctgtccccgctctcagtttgtgatctccaggaaacaggggccttgcctccctgggtccccattggacaagcggtgaggcctccgagggtgtctgctgagcgaggggagcgcactgccctccagtcctctccccgaggcagcgaggcaggttagtgctgggctcccttccccctgctgctgtgcgccgctgcccagcggccactgcctacttacaggccagctcctcagggtcacacctccctgaaagacccaagttctttcccagcaagagccagactcccccaaggcttctctttttgggatccaggtagaaagaggactctaatgggtgagttaaaacagaccaccctctccccatctttgggcccgaaatgtcagcattagaacccaaaccttagaattgcagtctgaaagaggagtttaagctctgagagctcttagtgctgggtacgggactgtttgtgggaggtggtgcccagttcttcccagggttgtccatgctacccagagcctgaggcctggagggccattcacgtgccagtcacatgcctctcccagggtacttcctgctgcctccaacttgctggcctggggtcctggacttggtgctcgtatcctccccaccccgtgccccactgggagttgagtgtgtctctggcctccagcaggtagggccagagcatctaccccaatgccattccccatgctgcggccctcggggaatagcttctacttttgtttgaatattagtatgtgagcagagagcccgtcagaagcccacctggcctgaggctgggtttctgcagggactttgctgttcctgagcagggctttaatggtctactaaaggtgccagatccctttccactttaattttgagggctcattttcaatcatttctctctgacgatttttccctaagaacatgaccaaatctgagatccatgaagtgtcagcctgagatttatgtctgtatccgagcctgcctccacttggctaagtgtgtgggcaagacgaggttcagtgcacatgtgtctgtgcatgatgtgtgtgtacgtggtgtgccgccacctgtggatgggtaggacttgcttccacatgagccagtgtcaaggcagcttgaggccctcgagtcacagggagctgcactctgacacctcccagcggcaggaacttgggcaacaactcgattccctgggcctcagtttcctcacctgtaacatgggagtgtgcgtggattctgcttacaggtggttgtgaggatggagtgagatcatgtgcgttacagccttagaggagcgggagccctcctgttagctgtgtctgttttcatcatttgggtggctcacgtggactagcactgcaggaagtgctctaagaagcctcgtccaccttcctgtgtcttttgcagaatcttggtcagatgaggaaagtgccgattctgattaaaaatcctgggaggtgggaggcttctcagcgacacttagcaatctgttgagttgaacaaatctcgtgtcaacaggttgttttgcttccacctgaaatccctcccgctgtagtttcagctcgttattctcatcctgtcttgagtgcagcagcactttcccaccgtattcgcttccattttccagagatgtgctgagcatttcctgtaagccatgccctgtgctggctttgaggggacacggtgtgtttaggatgcgcccagctaacgaagaactgcagagtgggactggggtcactggagagggagaaataaagtgctcaaaggagagtgaggtcacaaccaactaaggtcatcagggaaggcttcttgaaggaggtggcatctcagaagcgccccagagcacagaagtggggcttcaggggcaggacatcattgtgggtggctgtagtgcccgggaggtggactggggcctgggttgtgctggaggccaggctgaggccctgccttggtttggggaggagatccctgcactccggaactcctctgtggcccacggaggatcgctctgaactgcctcagcgtggcggccagtgggggtaggggtggagagaggacagcagggagggaggggaaggggccaaatgagctcatttggtgtcggatcctgattctttctattccatagaccagagcttaagagctcagacttggagagcaacagaacagggtttaaattacactgaccccagggggttgtgacgattaagggggaggccagggtcaggtctggtctgcgagcgagtgatagcagtcatggttgaggatgtggcaggtggagaagggtcccttttctggcctcccagaggtctccatgtccccccttgcccactccatcaggctgaggcgccccagcatccagaacattcctgcaaggggctgccagtgccagggaaatgggggtgaagacgtcaggttcctgtctctgcagcctgaccctgtcccccaacacacacgctgggcagaaccgagccaccaacccagaggggaggtgccctgcagacggcccaggcccccaggcatgagtgcaggtgcctggcagccccctgcaagaacagctggtgggcagggccttctgggccaaatctcccttgctgatcacatcacaggccaccaacctgtctggaggacagcaagggtgcttggtgggcagtggaggtgggggtaagggaggtgcagacgcctggggctttcctagctaaatcccagtatggagtggtttgtttttttttttcagcagcagctctatgttgcctactcctgtcctactgtggtcctctctgacccttaaaggctgcccagccttatttagatatatgaccaggttcctattttctctttcctgtggtcacggccctgctcaccaccatccctattgatctttcctctctgcttctgtttcaaatgtcaaggtcatttttaattctgagccagttattagctgccccgtctgagtgcacagaggggacggaggaccatctcttatagccagtaaccggagagctggaacttgggtctcctgactcctagtctaatgctcttcttactataatgaaaggggaggggggctcagtgcagatgttcgagatctgatagatcagctgggtcatgggttccagtgatccttccttgaaaaggtaaaaagatgcttagagattatggggtgtgggttagatttgcatctcactaagctgttgagtgtgggctgtgtcctggggaatacttgggaacggccatggtctgggggcaggaggccttcggagtgtccctcccccgccactccctggaggaccccgggagacacaggcgagttcgcccctgcccctgccaagccagtgggattccccagcaccccagtgagcagaacctgtttggaaagaggcttctggaaggcctgcacgattacttgtataggttcccgaagtgataaataaatgcatgggtaaaggggaatccacttagattccctaaaagcctttgaaacaaggtggtaggcgagtctgttctgatgtgttagatccccatgcagtagtgttgtggttaaaaaaaaaaagttcatagtgtaatctcagttttgtgaaattctttaaaatcgatacaaatatacacatgtttaggtttgcacatgcatggaaaagttgttctggaaagatacacacaaacctgtcaacaagtttttgctttttaactttgtacactttcgttttctttgaaaaaatgtaaatgaacttgagttactttcttaatgacaacaacaaaaataaaactacactttttaaaagcctgtggatgagaaagtagaaaaaagaattaagtcacctaaggctgagggatggactcttttttataatggataagaaactggtttagagactgacagcaaggggtaagcttactcaggtacgtgtcttttccggaaaggttgcagggagaaatatcgcagatattaaggcctctgagcaaaggcctaggctggtagggattaggtgagagcagaaaataggccgctgactgcatgcaccctggcccacgccagggacaggggacaaagttagctttataggatggcgacttgaaactcatttctgacccaaagtggagaacaaatcactgaggatcttcccccaaaagcatcagtctgatgggctgttgtggcccaaatggttcctggggaactggaggtataactggggcccggcccgggtatggagctcaggtgacccagccctggcatagtgagagcctcttgggaggccacacccaagggagacaaagtggggcttcaggaggccccacgaaggggtagaaggggtgtctaggaacttgcttggcacgtgggttcaactctgatctaggggtccctgagcaggtggtgatcacccagatgatggggtggagaggtgaggtgggggcaaatacaagttcctctgtctgcagtcgtcttgctaccccaggaagctcagggctggttgcttagcaacagcacttaccaccctcttccaccttaccctcccgcaccccacccatgggtgcctcttggggcttcccttcccccgaggctgcccctgttcaataggacatgggaagggtctgtgcacttttttgaccctgcccctggaataaggcaggaacagacataaaaggacctatgacttggaggcaagcacagaactggcccctctacaaaccagctgtttaatccaaggctggtaggggacagatgtgcagggcaaaaaaggcgttcgggagtcaggccgacctggaggactgtctcagccccatttgtgctcagttgctgctggccccaaaccacctggagctgcaggtttttcatctgtaaatcggggataagaatagcagtctcatcttacaggggttgcctgaatgacgtgcaatattttgtgaaacagctagcactatgcctggcacagagaaggtgctcaggaggcatgagctgcttttctttacgtgggggttgttccagggctgcctggttagggtgacccccacaaagccctgctgctctgtaaggccctgctgctctgtaagaccctgcaagtggccaggtgcagtggctcacgcctgtaatcccagcgctttgggaggccgaggcgggtggatcatctgaggtgaggagttcgagaccagcctggccaacatggtgaaaccacctctctactaaaaatacaaaaatttagctgggtgtgatggtgcacgcctgtaatcccagctactccggaggctgaggcaggagaatcacttgaacccgggaggtggaggttgcagtgagccgagatcgcgccactgcactccagcctgggcgacagagtgagacttcgtctcaaaagaaaaaaaaaaaaaagacctgcaagtgtggcctgtcctccccatggcccctcacggtgaggggaagagataatcaagttgagaatgacccccaagcccatggtggactctgggctgggagtcaggggccacaggggagtggcagggatagagaaagatgtctctgtcctccttagcttccgttatctgacccaggtccctttttccagctgccaataagttgtccctttttctcttagcctttctgcacctccacttcttcctgtgaagccaggatttgcctgtaccttttttgatctcttcagagtcccctgtccatgtggggacccagtagcctgctcaaggcctgggccctctttccctccctgcccactggtctctttggagctaagcggagagtggcctttgctgggttctggctctgccccacggcctggaggcaggggagggtctagaccacagcccggcctggcagctggcacgcagcaagggctcctaatggttttattaccagcaacaatgtggtgcttgttgccatccacgcacaggctggtggttcccagcccaactggtggtggcctgagggccctgcctggtactggaagctcagctgggaagcccagtggggctgggcagtcagtcacctctgcgttttcttctgtcaacaccctgccagcagcctggaatcagagggagccagggcacggcatggcgagatgctggcccccgagttggcaggcctggcagcacttgagttttctttccagaggtccctgcctcagatccacaaatgatgttcatccattcatctaagagacctactgtgtgccagacacaggctgcatagatgaagggggtcacactcatctcaatgaccctgcagcttaggtggggtctggcagggcggaaggacccctggcacaccatgtccagggattaccagggctcagagaaggaagtcggattcagggggagagaagatctggaagggctttctaaaggaggtgacgcttgagctgagtctcgaagcggagggagcagttagctaggtggacgacggcactttctggccccatgtggctgcagtgtagggaacgatgggatacgaagccaggggcctgggccgggggacatggaaggcgggatgttatgaacggacgttgggcttgggatttatatttgagaaggatcattctagggcatcgaggacgagagctcgggcaatagggtttaggggcagggagcccgggtggaaggctggcacagaagtccggggcagcaatgtgggcctggacagggtgtgcgtggtgtgacatttaggaagtgcagtcagtaggaacaggcgggataaaagcaatgaggggagttggggtggctgtctggtttctagctcagccaactgtgtgggtggggatgcccttcatggagggggcatgggttggggggagtcggagagagcaggaggtgcctcccacatggagctgggttgtagctggggcttgagggcgggtgggatttccccagggggaggctgagccaggccaggcttgcagaaggaggctggagcctgagtcataaggcctggaggcggggtgccttgtgcgatggatgagaaaggcaggtgcatttcagtctgtaactggtacgacccctgcagatgtttgaaggaagattttgaggaaggtgctcgcacccttgcattgggaatgctgatgagttagcgcctctacttcacagtgatttccccaaaagatgagctgcaaggcctagaccctggccctccacccaggacctgcggcgagcatcatcaccgtctgagaatctttgggtgggctggaagttgatgtcaagctgtccagcctttccgtcactctccattcagaggcaggtctgcggagagagataggagggacaagctggggacagcatttttggaaagcaaacagaaaagaagcaaaaactgttcctctaaaatagaaaggaggcttatgtgtgttatgtgaaggataatgtggaaggctatttccaaagaatttctcaaaaaatgacgtgagccatgtcagcatcattgaatttagatagaggccaggagcagtgtggcatcgtgctggggccaccaggctggggactggacagatgatggtttcacctcacccctgccacctccttgctgcgtgtcattggaagatcactcaacctttcttaggctcagttttaccatctgtaaaatggacataacttcacaggctggtgttgtttgttttgagcattgcttcttggactaaacctggatattttttccttccctccctcgcttctgcacttcctctggttctttgcctcccaagaagcctgtttcctcctgttccctccaaaactccaagttttgagttcccccttcctgggaaggtccattcgtcatgttctattgactctcttgttcccaattattccctgcaaacctggttcacccagtgtatttgaagagcatctactgagctaaatgggagttattgggggtcagttcctgttttctttttaataaggggagggagggtctgtgcagagctgtccgggagagcagagggcatgggggacaggggggatgttgcaggacccagtgggaccacagctgggaccttgccctgtagctggctcagtgtgccaggggataggggcacagagccctggtgggtctgggagatgagcttgggaaggacttggcctggacatgggctaggctgccctgctttccgagccagacctcaggagatggcagagagggccgcttcctctgtgagggccgtacatgatggcccttgggctgtatggtggccttgtgacatgcagccacacccctggggagacctttgaagcatctctgcattctggaggatctgctgggaagatggcttcgcagcggggctcttgttgatgctgccaagaaggccgggtgggagtcgggctgtctctggctgggggtggggtgggggctgcggtccatccgagtgtggaaatccacgtttctctggtttgtgcagacctgtgcaagcagccatgctgcaggactggccccctggaagtggggcatacatgaactcagggtgtggcgttgtaatcaaatgaaatgtacagcataattaatctggcatacccttaatgatatgcataattgtgctgcatggtaattaggtgtaaatggtaagcagttcacataaatgtttttgtaattggtattaattttgcagaggcaaaccaagtttatgtggtttttctcttcttgctctgttagttttctagtacaggcatttccaagcttttggaggaattctattgcaaatgtttgtttatagggcaatgttttgtgttttctctcagaacaatgttatgaatggttatgaggttcccaagctggtttccaaatgcctctttggcccatacagtaggtgaaatgtgcaacgcgtgtgcctgtgtcggaaggcccgcccagcatcctctggctccaggtgccccagcgtgtgcagcatgaggggggctgtgtgcgtgtgtgaacctgtgcgcctgggtcatctctgcatttgtctaggtatatctctgtgtgtgcatctatgtgtgtttgtatctgtgtgtctgtgtgtgtgtgtgtgtgtgtgtgtgtgtgtgtgtgtgtggggtctgcatgactgtgagagactcctgaggccacagtggcaggtagacattctctggtaaatacattccccattctagtggcacggggcctgggctggagacttaggggcatcagctgggagggggagcctggcacagcagccgttcctaggagtgagcacaagccactctgaagtgtggtctgaagccagagtctaggtttcctaagaacatatggcttgcctttctttctgatcaagcacataataatttttaaatgatcatttattgagtacctgccacgtgccaggccctatgttaaacacttgactcagattccctcctatcttaaaatagacttatgaaatagggactctttctcaccccgctttacaacttgggaaactgaggcccgaatctctcagtgacagagccagggtttgaggcagggactgctggaggcagggcccatggttctgagatgtgctgctcagaaccctgggctcttctccctccctcggccccctccacaaatggtttgtttttgttgggacagacgatgaggagaaaggcggccctgtgggaaatctgagagcagcgagctcccttcctgctgaattggttggggtggtgggggacgagctccaacagccgctcccaagccctgaagaccctttgggggacctcctggttttgacccaagagggagctggtttaggaagtggggttgggggactgtggccatggacggtgtggggagagggtggtcacaggccagacaaggactcagcccccctgattcctgtggttcactgatagcctaggccctcaccaaccccttcaccttggggatctggggcaggtgagcctgcagacccacagcaggtgtatgttctgccctcggagctcctgcaaacagcctttccactgacgcagtgccttgggggctctgccaagcgacccctagaatggggattgtggggggtcgctctaggcaccgcagcactgtgctggggatgttgcagctgcctgggagtgacttcacacagtcctctctgcctccagggtcacccggaacggggttgcgggggacaagctgtgggcgggggggacgggcagcaagatacaacgcatgaactctgacctcgtctctttgagaaatcagacacatctatatacgcatggaacactcaatgacccctgggtgggtggtcgaggagaaggggacggtgttttgggggaggagagatgttgggttgaaggactgggagagaggagctgagtgggccctgtgggagagggtgggagccaggggtgtcattccgggacagcagccgggcctggaatgatgcagctgggagaggtgggggcacggccagagcagtgggcggaggctgcgttgtagccagccctggtgagaccaggccagagcgtatattttaccacgtgtgcaaatctttggcatcaccggatttttaaaaataatagctttaagatataattcacattccatacagttcacccatataagtgtacagttcgatggttttagtacattcacaatcaactttttaaaattgtcatgaggtgtcataggttttcatagagggagccatgtgtgggcaatccttgctgatagggtggggtgggaggtagagatgccagaggcaggtggacccgctccagggcatctaccaggttattgtgccacagacacaagaggtacaaagggcctggagggaatagggggacgagagaagcccaaggaccaggtacctgctggatgtgaggacccaggggaaaggtgggacctgagttttctccagggtttgggacttaggcagctgaagggaggggaatgttacttccacatagagggaaaaaccagaaaatagagccggctctgaaagaagcatgttctggaagagtaggattttagggactgcaagtcatccagttgggatgaaaataaatagagctggagcccctggcagtaggaggcgtatgttaacttatgcccaggtgtcttagaggaagagcatttagagagaagctgaaggtagaacatgacctttgaggagcacccaccgtgcagaagtgggatcaagactcccggacagccccagagacaaagctgcagaatctgaggctggagacccagaagcaaggagccagatggagtcatggctgggagagaacacacagaaggcagttgctggtgagctccagaagcaggggtctcctttcactccagggcccggctccacaatggcactcaagaaatggctgttgagtgagtgcttgaagcagggagtgattagctggccaggatgttgaattgagctcaagggccatgaggatggaaaaaagccctttggggccgcgggtgactgtatcagtcagggtccattcagaagacagaaaccacatggtgattggaacaaggaaagtttcacataacgaattattaactctaattggattggaataatgaggaattggctagtaagaagtaaaaataactccaaagaatacaaaaataatagatatgagaacagcccctacctctagggttgccacagagtgcccaaggaagaggccccgcagggttgagatccacaccttgatggagagggtgtggcgatggctccctggatggcaacgtctctgtaatgccatgttggcagaacttgctggaaatccaccctctggaatttactggaaatccatctttttgggtcccaaggaaagttgtttgtgggaggtatcttgctggaagcacaccgctgctacgttttcccaggggagtgctgggagaagctcctggctgttgggtactcctgactgacgtgttgctggagccaggtgctggagaagctgtctgcattgcaacagcctggcactcctgcaggagctgggcactggaaagctgcatgctggagaagctgcagcagcacaggagctgggtgctgggaagcttcatatctggcaagaccctgatgctgggaagcgcccatgcagcaagatctggctgctagagaagttgtatacaatgcaggaacccaacaagagcacactgggtctagaaaggaaacccacctcctccttcaatgcctcttcagtgccctccacagttgtgccagctgacaaaggaaaagtagttaaagggcccagctccatcttcacagcacaggcaatgatgggcgaataaactgataactggcacagtttacccctttggctgcacagcttccatttgcacctttctacaacatctgaactcccatacaaaaacaaacaactggatgtctacctatcaagatagttatccttcttatgaaattctcacccttttgcccagagagccccaaccatcattctaccaatccctggctacaataacttctcaaagtcagtcacagtctcactgaatattctgttacctaaagactacattataaagctaactgtcaacaacttgtatagaaaagaatgggaaggagaaaaaaagaagaaaatggttaccatattgcaaacacaccacacacacacacacacacacacacacacacacacacacacacatatatatcaagttaatagaaaatgtgcaaaaccactagaggcctggtttctgcatttgttcacaaggctacactttacacttgctacctggcttcattgtcttcttatcccattctgtgtttcctccacactcagccagagccttagcaggtcatgcttcttttacttggtggagtaacccaaaccctcattcccaaaggacctgaatccttagttatcccgcttttgttgttgttaccataactttccattcagccttcctttgggcatggacgttcttaagaggtgcctgagagaattcgctgggttccagacacagtcttgcttggctctgtggctgatcagcaatccagttttctccttggtaactaggatcaatcactccagacagtggcataactccttttttccactgtcagttcagtggcgtaaggagttcgagaaagccaagtgggtgtgtgtgtcttctctcccagggaaagcattataatatgtccctggtgggagcactctcccccgaggacgaggtcagcatccccagaaggttttagagttgtggggtggggaaacagggccacgcgcaggggactaagtgatagaggctctggagctggcagctgtggaccatgctgtagagaaggttggaaaagtagagaaacatgcagatgaccgtgggccgcttccgctgtggatgataaaatcagacccatgctggtcactgccagaccccatccaggaccatgtgtctgattctcacatggactctgtgccaccctgtgcccctgactcccaggccgtgggaagcccatctgacccacagcacgtgtgacccctagacagggcttctcctggcttgcagcacttggaaatcggtgctgccttacggaagtctgtgttggctcattttggctcctgagaacaacttcagctccttaacagcatctattttaggtataaatcccccccccgctcacttttggggctgtgtcatggcaaccattagtgtgagcaaagcagtctgactcagactcccatgtggccgccgtagtggcagcaggtttggtgtgatcataagtgctcctgctggtggtgccagtgctggtggtgccagtgctggtggtgccatggcctcgagagtggtgtgagagccacaagccgtcttattgtgactctagagccagataaatcagctttgcagagggcaggactgctggcctgtcaccagtggcttttggtattctatggacagctggtagtttgggtgcaagtaatgtttctgaaagtcagggcaatggaatggtgatggccatctcactggaaaatggcaccaagacccccctccctctccctcctccttatccatccccagtcttatgaccaagagaggttgtgacaggagggggaagagttgacagatagacatctccgtctaggaggtctcctccactttctcctggcccctagctgacccctaccctagcagatgattgggcagggggtgggggtggggcacaagatactctgctgccttctgtcacccacatttgcacctcctcctaagctcaaataggaaatttagccatgggactgttatctgtgggccagggtcaccccagaggcacaaacatcgatcatggcgctggctctgagatgtgtgtttagcatgctcattcatgaccaagaactgccacatttgcgaagggttctgagttacacggacctggatttataatcctgccctggggctttctagctgtgctaccctagagaggtattaaacctctttaagcctccatgtcttctataaaatggggataacaataggacctgcttcataggattgttttgaggattgaggatagtgcatgttccttagcacagtgcttggcacatggtaggtgctcaggaaatagctgcatgaatgaatgagtgaatgaccactgcattgggcagggcattgaatactgtgattagcatgctccagtgccctccttccccgctcccactgcagacaagcctgaccaggagagagagactgactggaaactttgttttctggccagtccgtgcccaaagttaatatagatctgcagcagtcacatgctgattgtgagagagggagtggagagctgtgagcttctgagtggggtggacctggactgtgcctggctccaccccttacccactgtgtgaccttgggcagttttattaatctctccatacctcattattctcatctggaaaatggggataaaaatagtacccacttcaaagggttggggtgaggtgtgaggattaatgagatgttgacattgtaaagctctgctcacggggcctggcatgtcggaggagcttaagtacaagctcctgcctgagcgaaggccacttagaggaactccagggatttcaagaaaggagagaaatctgcgggctggttgaatctgagagtaatcatcgttaagatttattgagtactttctctgtgccaggcgctcttggaagcatttttagggcattccattttaattttcacagcagcgctgtgaggtggaaagttctttctcccactcgacagctgagaaaactgaggcacagtttcgcctcaggccacacagctggtaagaaataaggccagtgttggaaaccccgcagttggcctcccagggagccctggaggggactgagattagcccttaggtcaggagggtgtcaaccacaagtcatagactcataccaaagtagtgaaagctcacagtccccggaagttcagagacgtccctgcctccaggaacagcaagaccaggggcccagacagtgactacaacgctttatccctctgtcttcatctctgagctcttcgttctcaggcaggctcacccacatggcgggaagacagcagctggcagcccctgactcacatcgaccatgttagcatccttccatcgcatcgataaaaaggttccagggaggcctctgattggctctgcctggtcacgtgctcaccacttgcctggggtgagggttgaggtcagcacaggcacaacgaaaaccttttgacaagcgtttcccaccgggaaggaggggaaggcatctaggtagagcagaacaaccagagtccactagaggaaaaggagaatgcaagcagagggagggagaaggacctgctacagaaatggtcagatatttttcagccattcagacagagaacttgagacggagaagaaggggcccttagggtgagaatattgggatcgtgtttggtggagtgaggatttaggtttgtgggccgtgacagttttggttttggaagaggataattatgtgcaagcccttgttgaggagagactgtggggtggcaggggggccagcagtcctcaatctgaagatggagaggaggcttgggtggtcatctcgggggtgctgatgaggctggggttggtgaggaagtgggggcggcagtggggacagtgtggtgcaggggagcagtcctgaggcttcaggagatggtggagatgtagctctttggtctgagaaggggctgagtgagcgggggttggggttacggatgcaggcagcactgacttgcgctgcccatgggctggacgcagcgggaatgatgtgtttggaggattaaacatttcgtgagggtggggggtggagagggaggtaccagtgttgtagctggtgatggaactctgtgtgggtgtgaggagctgatgatggttattctgtgggacgtgatgatttcatagaacaacagaggtggaaaggcctcagctacactcttatttatagagaaggaaatggaggccaaacgcaaccgatggctgcagttgggacgtaagccctttctcccatccccactctctctgtttaaaaattcatttttatttactcacagtagtacatgcatataatttaagaagtcgaatagtactaaaacctcctaacaaaatgcagtgattccttgcctactcctacccttatcctcttctcagaggcaaccgctttcgattctcttggctgtttcttccagcaattttcatctcatatttctgagtaaagtgcatatttttgattcatctatttagacattttccattgatttcctatttagtagatcctcttacatgtccaacctttctgctcttcagccatcctccttaaatattgacagtactcttcttatattttttcaaaaaattgtttgttgttgattgttttgagacaggatctcgatctttgcccaggctggagtgtggtggcacaatcacagctccctgcagcctcgacctcctgggctcgagcgatcctcccacatcagcctctcgagtagctgggactacaggcatgtgccaccacactcggctaattttgtaaatttttgtagagacaggatctccctgtgtcatcagactggtcccaagtgatcctcctgtcttggcctctcagagtgctgggattacaggcatgagccattgtgtccagcctcaaaaatgttttgtgcatttggtagccagaataatggcccccctaagatggccaggtcctaatcccctggacctgtgaatatgtcaccttacatggcaaaagggactttgcagatgtgattaaattaatgacctagagatgaggggattatcctggattatctgggtgggcccagtgtaatcagaagggtcattagaagtgaaagatggaagcagaagagtagtcagagcaggagatgttgatgaggcagagagtactgtgatgggaaaaagactggccatcgctggctttggagttggaaggggaccacgtggcaaggaatgagggcagcctctagatgttgaaaatgtcaaggaaatggattctccttagagtttccagaaaagaatgcagccctgccaacatcttgagtttagcctagtaaggagaatctttttttttttttactactgacttgcagaattgcaagataatttttttttttgagacggagtttcgcttttgttgcccagggtggagtacaatggtgccatctccgctcaccgcaacctccgcctcccaggttcaagtgattctcctgcctcagccttcccgagtagctgggattacaggaatgcaccatcatgcctggctaatttttgtatttttagtagagacggagtttctccatgttggtcaggctggtcttgaacttccgacctcaggtgatccaccctcctcggcctcccaaagtgctgggattacaggtgtgagccaccgcgcccggccgataatgtgttgttttaaggcattaattttgtggtacatacaaaagtaatttgtgtgtacatacatgcatatatacatatatatgtacacacacatatatttgttaaacctacacacagtgtttattttattatttcgataaaactattattcacagctgagccttgtggtgcactgtaatagtttcttttcgtttttttttccctgaagttaataattaccttgtttctcatctgccttatttttttgtacctgttgctaattcctaccacaacttctaatataattttatttttctttaacaatactgttaccttaggacttctttttctttttttctttttaactgacacataataattgtgcatctctatggggtacaatgtgatgtttcaatacatgcatacattgtgtaatgatcaaaacaggatagttggtatatccatcacctccagcatttatcacttctttgtggtgggcctaccacactttccaatagccatcagtattgctttccacacgggcagtcacagcaggtaaaagatgtttcagttccattttttaagttatctatcctctttcactctgggctagttgctttctaggcacattgtagctgatgctctgtgacttccttttgtggtcatctttggaattcccattactttccggttggaatctctgttttctggctttcgtgtcctcctcatgcttggctcactcccctcattagagcacatcttccaggacacacatctgtccatatcaaaatccattcatggctgggcacagtggctcacgcctctaatcccaggactttgggaggccgaggcgggtggatcacctgaggttaggagtttgagaccagcctggccaacatggcaaaatcccatctctactaaaaatgcaaaaattagccgggcatggcggcgggtgcctgtaatcccagctactcgtgaggctgaggcaagagaattgcttgaacccacaaggcagaggttgtggtgagccgagaatgcgccactgcactccagcctgggctagagagcaagggtccatctcaaaaaaaaaaaaaagaaagaaagaaaaaatctattcagttcctgggtttagatagcagagtatggccacgagcgatacctgtgtagttttgtcaggtaaaaagacagttcgacagcagagggcatggtgatgacggcactcgtgccccagtctcagtgggaaggctggccctctctggctcatgccaggtgactggcatgcggcctcttttccccttcatcctggagcctcccttcccatctctcctgtactggatcttatgcgtattagaggacatcttcctgtccttcctgggaaaggagcgtgaggcctcatatgtctgaagatgtctttactagggcccagcacggtggcttacgcctgtaatcccagcactttgggatgctgaggtgggaggatcacttgagcccaggagttcaagatcagcctgggcaacatagtgagaccccatctctatttaagaaaaaaaaaagaccccgggcgtggtggctcatgcctgtaatcccagcactttgggaggctaaggcgggcggatcaccaggtcaggagctcgagaccatcctggctaacatggtgaaaccccgtctctactagaaatacaaaaaattagccgggtgtggtggtgggcacctgtagtaccagctacttgggaggctgaggcaggagaatggcatgaacccgggaggtggaggttgcagtgagccgagatcccaccactgtactccagcctgggcgacagagcaagactccgtctcaaaaaaaaaaaaaaagaaagaaagaaaagaaaagggccaggcgtggtggctcacacctgtaatcctaacactttgggaggccgaggcaggcagatcacgaggtcaggagattgagaccatcctggctaacacggtgaaaccctgtctctactaaaaatagaaaaaaaattagtcaggcatggtggtgggcgcctgtagtcccggctacttgggaggctgaggctggagaatggcatgaacccctgaggcagagcttgcagtgagccgagattgcaccactgcactctagcctgggcgacagagcgagactccatctcaaaaaaaaaaaaaaaaagaaaagaaaaaagaaaatgtctttattttactctcacacttaaatgataatttggctgaaaataattctaattggaagattgtttaagatttggtttattctttaagaattttggctgggcacggtggctcacacctgtaattccagcactttgggaggccaaggtgggtggatcacttgaggtcaggagttcaagaccagcctggccaacatggcgaaagctgtctctactaaaaatacaagaattagccgggagtggtgacgggcgcctgtggtcccagctactcgggaggctgagaaatgagaatcacttgaacccaggaggcggaggttgcagtgagtggagatcatgccacttcactccagcctgggcaacagagaaagactccgtctcagaaaacaaaaacaaacaaaaaaacccaactgatcggaagctctgagaatgatagtggacttgttggttttcaagtctacataggctgacctgaataagtcattttgaccccattttggtactgatgttggtattggcatccttaaacctttcctcttagactcattcgattctccagagaaggaaatggttgtctggctgccagtattcttagagcccaatcggggaatagcctgagagactggacatcagcatttaaaataaccttcccggccggcgcggtggctcatgcctgtaatcccagcactttgggaggctgacgtgggcagatcacctgagattgggagttcgagaccagcctgaccaacatggagaaaccccatctctactaaaagtacaaaattagccaggcttggtggtacatgcctgtaatcccagctactcgggaggctgaggcaggagaatcgcttgaacccgcgaggcggaggttgcggtgagccgagatcgcggcattgcactccagcctgggcaacaggagtgaaactccatctcagaaaataaataaataaataaccttcctctccttggtttgatatatcatctttgtcttcagctgtgccaagtgactctgtgcaaagaccccctattttatgccctccagtgactacagataaaccttcaaacttgtagaagagggtctaggaattcactactctcactcagcctctcgtttctcacacaagcatcctcttcagccctagtgccagagtacctggtgctgtcatataagcatctgttgaagactgtgttatatatcagcgttcacacgcctgtctgaaatttggctgtcacaagtctgctttccagattccacaattttgttggtggtattccttctcttgttcagcctaatcttgtgattttatgtcttaaaaaatcttttggccaggtgtggtggctcatgcttggaatcccaacactttgggaggctgaggtgggaggatcctttgaagccatgtgttcaagaccagcctgggcaacatagggagaccctgtttctacaaaaaaaaaaaaaaaaagccaggtgtggtggtacatggctgtagtcccacctactcaggaggatgaggtgggaggatcacttgcacttgagcccaggagtttgaggctgcattgagctatgatactaccactgcatccagcctgggtgacagagcaagaacctgctctaaacaaacaaacaaaaaatgtttctattgcattgagtttagaaggtagtgagccttggtatgcatattcaaagctttcagttctttttccacaacagttttatagttgacgcagtggagatggtgatcatatcagctgtgatacgaagatgttttcatggtgggattccttgaaattttttaagtggctgttaacaaacattattcatggtcactgtggactctaaaaggaggaaataaaagctgcttttcatggtggtagggttcttggcaagggttttttggtggcagtggtggtggctgtgcagcccttggcccaggtgggaagaacgctttggtatcggaagcagccagggctgtgcggtggaaggaccgatgtggtggacacccgctgctgtgttgggactgtgggcccaggagagcccactccccatggctgggctgcctgaaggaagaatgaagcgtctacgggtaggtgggcaatgctatgtcaaggtctgggaccttggccaccaactggggccccctagggttgtgtagtacatggcccgcccagacacatactggaggattttaggtgatggacacgattttgagggactgctactgacagggctggtccattgagcaacacgaaagggttgacccaggtcagctgcattttctgtgaggacagtttctgcagctcagatgtcagagtcttgggtggaggaaggggaggaggaagagaatcttcctttcctttcctgtctggggtgtctgcccttggggccaatgccctgtgaagttctgcttttccctccagcttccttcctctccagagcttctctgaacctcgccacacccgtggcggcacagatgccctctgggtgtccctaagcctagggcagcatcaagacaaccctcccgccccgcttcctttgtgcctgggtctcccccgactccatttggggtgccctgtccttgtcagccccttgtgtgtccactgtgcctgtggggccgcaacagcttccttggccggtcagagctattaatagaaggggtcctgctctcccatttcattggtggggaaactgagggccggggaagcctccgtcaggagtagatcccacccctgcggactttgggctcaacgttctttccaatcagactctgcccctcttagcttctgaccctttcgaaggtttttgttttagtgtggctggagatgtctgtggtaacaaatggggagtgaggcttgacagggaatcactggctgctaagggctggcagccgagtgcttctgggttggaccagttctcttttgggatcttcagagttgcttctgtggtgtgtgttgggggacgtgaacccaacccctcagaactttagtgtcagagagatctgggttcatgcctctgatgggtcctggccttgttgatcttaccgtcacctgtaaactgggcacggcacagcagctgcccagatgcagagcacgagccaggccctgagtggcatgtggccgatggagctgctctccgctgccgtccaccctctcgggacccgggcagcaaaccttccttaagcccagcactgcgctgtgcctaggggtatggggaatggacgcagtgcacctgggctgcctcagggctcagctgtggggcaggtccgcttcaagcctttctgggttgacctgatggagctcttcctgtcctggccctaagaagctcctcctgccagctccttcctcccactaccccctggggcacagccagggctggggcacccactcccaggcaagaatgcacccctggagaaaggggctaggcctgtaggagagccaagcctgtgctttctcccggtcctggttttccagggagccctgactggagggggatgggaggagaagcccaggagggagggggagctggggaagcagaaccaggaactggaaggggaagggtgtgggtgggcccagatccagcctgcctcccgctctcccttgcctgccaatcccctcctgggccctggcacactcaaggcaggggcttggcggccgcctcctccgggggtggggagcaggggagctcttgtgtgtctctgagtgagggggctgagacagcaacacccccaccccagctgtggcctgagctgcaggctttgttatttctctggcttgaggcctacacctggagcagagggaagaaaagcccctaaactcagccgtgtgggttcagaggacccctcaagcccaccaactctgcaggcaaatgaggctggttcatggggtgggggagagagcagcctcactcctgcctcagtgtggccgtggcctgtggccttggccgtggccgtggcctctccctcctaggccagagccaaccaggcctgcagcctgagctcagacctcagctttctctgggcccaggcaccggtcctgaagtgaggtgacattcatttcactacatcctgtgactgcactcacttcctccacgtggcgggaggtgtgggggtgggggtgaggacagattagaaggaaaacgtagctgggctaggggcctctgggggaggctgggatttcccaggggctggttggggtgggagggaggatgcgggaagctttcaaaggagagagaggctgtgaatgaagagaagggaggaggcggaggcagctggaggtcccagaagtggcacccattggccgcagcgacacggaggggagactgctgccactccaaggctctcagaggctgctggggtaggaggtggccctgaagggagcctgcctcggtttctctgctctctggggtgctggtgaggccagaaggaggagcaacaccccaggcctcacaggccaggtgtggccctgggctgagggcctgacccagggagggtggggtgctccgccccactgatcctcttctctcccccacaggtggagccatcgaagcccccacccacaggctgacagaggcaccgttcaccagagggctcaacaccgggatctatgtttaagttttaactctcgcctccaaagaccacgataattccttccccaaagcccagcagccccccagccccgcgcagccccagcctgcctcccggcgcccagatgcccgccatgccctccagcggccccggggacaccagcagctctgctgcggagcgggaggaggaccgaaaggtgagcagcgggctctgctggggaccctctggcctgggagagggagagccctgtccctatgtgatgacagccggctcctcatactgagtgcatgaccgcatcactcagtgctcacgacagggtgtgggaccatcacatccctgtttgggtgatgaggaaacggaggcttgcagaggttcaattctggtgatggagcaggcatttggttccaggacccaggcttttaaccaccatggcattcgcacagtggctcaaagcccaggtctgtgccattgtgagggttcggcctcacagagagtcccagaacctggattccttctcggacccgcctcttactagccgtgggccttcacgtgaatcactttctctctcagctgcctctgtttccttaaggtgttcagtagcttctaggggaccaaagacaagttctggggtggggcacggcagacacgaggccgcgggggcccaccctcccacacagacggaggcacaggctgggctcagtgtggcgccagcacactttggagatggtgatttcctgtccccgccccccaccccagactccaggtgaatgtcgctgggttatctttggtatggcttttggccacggagctggtgacctccatgttttcagaatctagttgggggtggcctctccacccttctgctgaactccaggttgtgcctgaatcagtcagaggagattacatcagactgatgggagtccctgctgggtctccacaggctgtcttgggaccttaccaagctgtgtccccatgataggaaaagctgccccttaacccccagcactggactgtgttgccctctgtcagtggaatggtgaactcactgccaccctccaggggatcttatgatggccataggccttcctggcatgtctgtctgctgtgcctctgtccacagttccccctgcctgctccccttcccctgagtagcgctgggggttgtgctgcttggtggtgtctgggagtagctgggcatgctcatgggggcaccagttggttcttttggaacaaaggtggacacctggcaccagctttgggggccctgggcactctggggctagaggcagccagcaccctacctgaagggtgtcagctctgagacctccctcttgcgtgctcagctccttcctgggtttaccattcttcagagtgtgtttctgtttcctagttttccatcaatggttctatttggtccttggggacaactcttgaaacaaatggggcagggacagatggccccagtttacagatgaggaagctgagccccgctgggcagtggcaggtccagatgacagcctgttctcctgtctcccaggtccgagcccttcccacagccctacctgcataggtcctgctagggacacatgtacacatcccaggagtgcacatgacgcccagggacctgccttcccagcccagcaccctgtagagcaccgtgggggtgtgtgcacccagtcagccagagcaggtcagaaagccagcatgcgctgcggcccactgggcaggacgcccggggcgaccgatcaggctcctcccttctgaatccatgggaaaagaactgatagtcctggatacctgcgggcccctaggctgcccccgctcaggactcaagcagcatgaagacccaagccctttggccgtagagttggggacacctgccgctgtctgtgctctggagtggcaactgtggccatggctgactccctccccttcttgggcctggcttgctttctctgtcggataaggtgaccccgagtgtcgccccactctgggtccgatgtcctgacagttgctgacgcagctccccatcaatgcactggcagtcactggtcagctgctccccacaggtggggagggtggggacagctgggacaaactcctcctgttactggactgtactcccacgccgctgctgctgctctgggctgcggagccccaggccaccaccaatggacgggagcaggtcaggatctgcattataatagctcaggactgagaagcaacgctggaccaggagtcagaaatcccaggtcctagtcctgagtatgccacttactggagatgtgacttcaggccatctgggcttgtgtttgctcagctggaaaatggggatagtgactccagccttgcctgttttaaagggtggttgtggaagtcagataaggtcatgggcatggaagtgacctgcagacagcaaagtctggtccaattatgagggattacgattgctattattatctacccatagtaactgctctggctcaagcggcaacaaacacacacccagccctagatcccggtgctgatagagtgcacactcacaccccagcaggaggggtcatgccaaaagatggcagtgatctggatagataagggctgggccatagccaggcctcctccccagccgcccacacctacaccacgcatgctggctcacctggcacacttccccggcacctctgggctggctccagcacctccagggagccgcccagggagggtggggagagacactgacagccaccacagcagcccatgaaagccaggcctgcggcaggggtgctggtagctgcagaggggaagacacaggcttggtctgcagcccagggagcctggcacaggtgccaggggcactgtgcacaaaggaactgtttggcaagccagatggaaggggtgtggccaaccaatggcccttccactgcctggccccatgtggccctctagcctctgcccaccgccgccccccctccccgcccccgcccccagccccgcctccatgcacctttcactccagccccactcccatacttcctggagtctccaggtctttgtttatgctgctccctctgccgcatgggccctttccctaatctcttctcctccctggtcaaagcctcaaagcccaggctgtagttggccttgtattatagtttgcaggggaccagtggttctcaaagtgggatccccaaatgagcaacttcagcatcacctgggaaggcaaagctcaggccccattccagacctgctgagccagaactcgggggatgggacccagccgggcacctttaaccatccctccaggggatactgttgcgcacagatgttgagaactattggtgtagataacttctgcccactgctagcctggagcgcagggtcacggcccttttcttccatgtgaatcccccggacctggaatagcacagagtgggtgcttgggaaatattttacggatagaacggaaagaaaaatgagagtagccaagaccctcccacaggagaataatcccggagcccaggatcagggaggcggagtgcagagctgtgggtgctgggctgaggcagccatgctgtggctgggagtgtacagagtggcctgtgtgtgtccccctggcacctgccgcctgccctacccgccatccatatggtgggcagagcagggctgcttggggagatggggaggaggcaggccgagctctggggctgtggtcagggcgagtcagctggtaaatgttgccgcagcagagggagggggctggcctcatggagggtgggtggggaggcaagcagtggggaggctgagagcttagaggggagtatggagcagagggtggggggcagagggagcaggacaggggaccaagaacagtccaagggccacctcagatccccaaatatgaatcagaggggagtccacagccccaggccaggcccctgttctcagttctgtcccctttcctctggcctcagaaacacaatggctaagatgcattgaacgccgactgccgggtgctatgtgcatgcattatcttattccattctttttttgtttgagacggagtcttgctctgttgcccaggctggagtgcagtggcgtgatcttgtttcactgcaagctctgcctcccgggttcacgccattctcctgcctcagcctcctgagtagctgggactacaggcgcccgccatgcccagctaattttttgtatttttttttttagtagagacggggtttcaccatgttagccagcatggtctcgatctcctgacctcatgatccacccgcctcggcctctcaaagtgctgggattacaggcgtgagccaccacgccgggcctatcttatttaattcttacaattgccgcataaggtagacactattattttcatcattctatcttattaagggctaaactgaagctcagagaggttaagtcacttgcctagagtcacacagcttgttaagtgctagtgctgaggctggaatgaggctggcttctgcgctccttaggctgtctcctgcgtgaagggggatggagtgaacagtgccccccggtggtgatgtgatgagaattcgtagtcctcccctggacttttgctgcaggagaaagcctttcactgcataatggcgctcttgcccttggggagaagttgggggcacttcatctccagcaagaactgcacacaccacctgcgtgtacaggcacacacaccagatggaggcactgctgcagacatgcagcttcttaccatttcttcctgcctcctgccctccttccttccctgcctctccctccctggacatacagctcctcttttcttctcttcctccctccctttcttcagacataggtacctttccaggtagttagcatgtagcagggctccgcaaggctgttggatgaactgagtgaccgtgcttggagggcctagtagaggggtaggaagacatcgaggtgggtaagccatgcctgccccccaggggtgggtgaggcctgctgggcagctcctctgatcaagccttctcctgcctgtagtagaagctgcagctggggtgcatctttgtgctggggaaacacagcacttatgtgtttgcacatgtgcgtgcgtgtgtgtgtgtgtgtgtgtgtgtgtgtgtgtatgcatctgtgggcagcattggggctgcggttcctcctttcccctccccatcaaagtctggcccagaggcctggcagccactgatttctcgtgggctctctccactctggtctgcaagtacaagggcctccatccttgggtggggtccctgccagttccagtggcagtcattcttgctgcccgcggtctgtcacctgctcctgggcatgttctgcctttcttgcactcagatgcccccacatggtcacttagggctggctctttgcttgacagtggttgcggtaaggtcatttcaaagagcatccttcttagtatgtttaaatagctatagaaaagccgctgcaccctcacctcttcagagacccagccagcgataatggcgcgctcactctgatctcgggggagttaggagagggttgggcgtgcttagcaggtttgtgatgtaaacagtgcccatccctgagctgagcaggacctacattttgggcttcggtttctctaaaattctcttaaattggacattattacatgtcaaatgtagttaatcttggtcagtacagtcttggatgggggttgtttggcccctgcagaagggcctgtgttgaagctggactctgtcacgtgacttggaaacatggctgtgagcaggaaaacagctcctagttggcttgagaggttcagacgagatggtgtgtgcaagtggttaacaccaggacatagcatatgttaagttagctttataatttattttggatatctacctacccatccacccacccacctacctgcctacctacctacctacctacacctttgtggtttacacccactgccgccccatgaattgcaggggcgtgggagaagagtaggaaaccatgggtggggacagagtgtgggcttagagtccactgagagcctagcacgtgaagggaatgttgtctctctttgggtcatcagtcactaaaggcctgagttccctttatcccttgaacaaaagtaaaacaaggcaagtggtgatgagacctaactcctgatggcaggggctgtagatcccttcaggggcctaggtgaggggccacagtcacttgggtccctcctgctcttaatggccgggttagggatggagcccagccctgctgataaggtgagtcgcccagggccagggcaggaaaggccaggctcagctgtgcagaatagaagaatgggccaggcgcagtggctcacacctgaatcccagcactgtgggaggccaaggcagatggatcacttgaggtcaggagttggagaccagcctggccaacatggcaaaaccccgtctctactaaaaatacaaaaattagcccagcgtggtggtgcgtgcctgtaatcacagctacttgggaagctgaggtgggagaattacttgaacctggtaggtggaggttgcagtgagccaagatctcgccattgcactccagcctgggtggcaagagcaaaactccatctcaaaaaaaaaaaaaaaaaaaaaaagctgcggtgtgtggtggctcatgcctgtaatcctagcccttcgggaggctgaggtgggcaggtcacctgaggtcaggagttcaaggccaacatggtgaaaccctggctgggaaaaaaaaaagaaaaagaatagagctgagtggtggagcagtgtcccaggataattgggaaatgagcctttcctctctggtacctgggcttggcacaggagtcctggtcataccctgcagctgcctctgcagagagccacagggcattagggatattccttgtaatcatcccacgtaatgtttgtgctgcatggaagggcatgtaaaggagtgttctctgcacggtaattgactcattctgtcatcatgattagttagggggcgcccagagcaggatgatggtcagaggttcctcatccccattttaccgatgaggaactggggcttagagaggccacacggctacaaagtagttttatctggatcttcccctctattaagcaagggctggcagagctgggtgtgctactgaaggagcagacatgtgtgggcttggtgccatggaagtggccacaggcagagcagtagcacactccagtctgggctcagcatggcatcaggtacttgtttacatgttgttgtctccctctgaaccgagtttcctatttgtttatctttgtatccagtacacagtaggtgctcaatagatttttttagtgcacccctgtgtctggccttgtgacatagagacctcagaggtggacagggctgaggtgtgctgctcgtgggtgtgaggtctggcccaccctgcacctccagaagacaatgaggccccagccaggtggacaggctgtggacaaggggctgcagccctggcacgagggcctgggaaccagatgggcaccaccgttgtcagctatttagcatttctggaacacctctgtgtgcaagtacccaggagctgtgggggactcagaggcgccaatgagacacggcccctcccctccaggagagtggcctttcaggaggatggaaggctttcctcggtaattatgacacgacctaagcagtcaatggttacttgtcggatattgttgaataattgaaataaagggctgatgagccttgggaggtgactgagatcagaaaaagtagggggctttggagggctctgggcccatgcgcatctacagtgattcccagcccactgcctgacccctcacgctgggatcagcctctgcaggttggcctgggcacgggtgtgtgtgcaagcatatgtgagtgtctgtgtggcattggggtacgcaagcgtgtggctgtagctctgcagagcctggtgctcaggcaacccaggacagggctctgcctcttgcagaagccaattcgtttcactgaattccatgaccacagacagtccctgggaggccagccagccagctggcaaaggctgggcatgcttcttgtcccagggggcccgggcaagtagctggctagatccggcaagttcatcccctcgactcaagcaccaactcgagacatctgctcaaccgatgctgggtcagtagcatccggtttaagtactgaagggaatacacgtatgtcaggctggctgtctctaggtgagggcctcaagagacataaatctcttgtggggaggggtcctgtgtctgggcacagccagcccagagtgtctgtgcctgtgaatgccagtgtgccttgaccttggattgcctgtatctttatggtgtcactgtgtgtgtgcctgttgacatggtagggtatagtggcatgttgcagtagaaagaccgatggactggtaaacaaaagatgtaaattttggttctaaaggcctcctttcctggctctctgatccctgcaagtcagataatctctctgagcttcaggtgtttcatctgtgtaacagaaaaaaataataccagctctgctttctgtaaagtgtaagaatacaatgaaataacatatgtgaagatgctttgttaattaccacgttcagtgcaaatgtgagagattattatcgtcatagcccagcgcatcagaatgagacgttgtatatggcttaaaataatccatccagtgagcagtgttgaaatgtaggtcagatcgtagcctcagatgtttagagagaggaaccacctaatctcacaggccaccaaatgtgaaggtgctttgaaagctgcaaagaatgacataaatgcaaagtgacaattatgtttaagtctagaagggacgttttagtcctcttgtttcctaatctggaatcgtaaagatccgagaggcactggaacctcgtacacagttgtatttgtacgggtttgtagatttgtacgtgtgtctctgtttgcgtctatggactcacgtcaggcacctactctgtgacagtcattcatcaagtgcctgccttggactaaatgcatccgtctaggcattctggatgccagcatgaatcagacacccacacttccctcaaggagctgaccgttgccttgctgggtaggggaactataggagaggaagggtctttcagctcagtctaggcaggggatgggaggagggggcctaggggcagggaatccaggataggaggctggaaaagcgagtaacagtttgctgataaacctgaggggaaggtggtgtggtcagaagaacagtctatgcctaggggctgaggccggaagcagtttgctttcgcgcttggtgctgtctgttgggaccacagtgtggagaagagaccaaggcgatccagccaaatcctggggaccgccctgcacatgagctgaggagcttggctggatcctcctggcccccgggaacccccgtggcaaaggtttaagctctgcagagtggcataatcagctttgcattttggaaagctcctagagccccagtattgccacatatcttgcggcaagagcgcccgccagatgttgggctctgtgtgatagtgagggatcgctgcatatggtgggcggcgtgctgggatttgcacgaggcagggagagggggatggggaggatggagtgggagtgaagtacgaatcaggatgtgtggagcgggggaaggtagcagttctcgagtgactatcacgtgtcagcttttgctacatcacctcatttaattcttataacatcactgtgaagtagatatcatcccattttatagatgaggaaagcaagactcagggaggttaaagagcttgaggttactcctaagcaaagagcagagcgaaactcccagcccggctctgccctctccaaagcctacgtgtctggaatttccaccccctcccctctgcgctggaagtgtggacgaattcagtcccctggcttgacagatgaggaaaccaacctgggctcaaatctgttcccgcgaactgtgttactgttcttcagctgtcccatgtcaccacggatcagattcttttctttcagagtattagcaacgcctcctaattcagggctacttgcagatttgataagcatgttttacattcctttgctcaacccatcagcaaagatatggaataaaacagaccccgtgacagatgcgagaatgaaccacttgctacgcttccttggagccattgaggggcacggcccaagccatctgctcacccttcttggcgtgttagccccctccctccgcagagggaacctcaggcaggcccagagcagaagcatcgcttcccgctttgccctaagactccatcgcggaagagttggcagaagagaacatgcttttcacaacgctgctcttagggccaaatgtcaaggggaagggccaggagttgttcagacctggctctcgtggagactccaagcacgacccagaagcatgcggggcctgaatgctgggccagccgtaaagctccttgcaccaggtgtggggtacacacagcacccctgcctggcactccccgccctctctggacctgtcaggacctggagaggtggcctggcaccggggggtccaccccttcctcctgggctgggttgcacggaattgaatccaacagggaaaaaaatgtgccgagcacctacaggccctgcacacgtggtgtaggtgagagatgccagcaggactgcatatggcagaggggtggcctgtcggggcccccaaaggctttctccgcatgcccagtggaagctggtgcccatcgtgaaatgtcaagcgtctttatttttaggtcattgctgtgtggtaactgtggttccctttcactgatcagacgctctggttggctttcacatctctgattagttcagaataaaagaaagtcaaatgactccctctgtcacaaatgcagcttgttaaagaaatagtttaaagcccagaatttatgggcagtaggagtttttccagaatctgccctaggcgctggggattcagcagtaaacaaaacagacaaaggggcagaccctttgtgaagctgtcttctcaaaacctgagaagcagacaggatggacacctccctacccccattttatggatgaggaaactgaggctccgagaggctgctcctgtaactaggaaatggacaagctgggctcatgcccactttgctttttccatgacctcacatgacccctaatgattttacaagtgctgatcaagacggtgcccatttggcactggttgaatcggattagaagccccacctcagcctgaaattcttagcagttgtgtagatccaatcagaaccttcacaaatactaagctgcactggcaatacgtcctctctgtgtgatcctttcttacactcgggggtctggggtcttcagaagatggttcagaagcagcaggcctcccctcccatggggcgtgtgcccttgggcaccctgagccctcatgaaggctcccgcgagtttgctcctcctcccacagcctttctgccctcaccgcccgtctgctgtgctttcctgaaaagagcccctgaaggatctccggcctcggggctggcctctccctccacagacggcacggggctccccagtcccctggcatcctttccagatgcttcctctgctgtgctccttaaattgccctctttggtccttctccagccctcactgccgtgtcactctgcacagcttagtgacagtgctcttgaaggtcagccattctgacccctagccaagcctcctcatcctcagtatctttctcagacagctttggtctccagtgttggcagccctccccttccttgctcccacaacacaccagggtcctcttctgcacctccgagcattctctctctatctcctgtgtgagctctgcctctctccagcttgactgtggccaccacctatgctaagaccgggcacctctgttcaccctccatgtgcatgtctttggaggcctcccagaacttgagccatgatggtctgccctgcagacatgcctcagctggaggatggatggaggggccagggatgctcttcccgctggtcttatgtctacagctggtcacagtaggtttccatttgtgtgtcccactgtcacctaaaaattaatgtggcaaaccacaaggtattttgcaatcacagaaaatgaaagttgagtaggttgttgagggccatcttactcaggtctccaggagagctgtggaccctcttctacctctgtgctgccagcactgccctgggttggcccctccttggggagggcccaaaagccatctttggctcctgacatcgtgcagggtatgaagagcagcctgtggcccatctgcagggtcaggacgtctttctccccacttccccagcatcatttctgctggggattagtcatgccagagcccagctgagtcagaagggacttgtgggtggtttgtggccaggctggagtagtgaggcaggactttctaggtttatgtctctgtgccccaggagacaagcatgtcagggcccagccgtgcacaggtgttatgtgaggggcggggagtaaaacaaacttctgttccaaactcggtgaatgcaagagatggagaggagctgagattcggtccctgagatcctcctgcaggctgacaggcatgcgcggtgccagctccacatggcaggggtgttcacagctgtacaagtcctccactttccatagttgtccatttcgagtattgcctggacttcaaatagatattgctaaatttaatatttcttttcacttgattttctttttttttttttgagacagtctcgctctgtctcccaggctagagtgcagtggcgtgatcttggctcactgcaacctctgcctcccaggttcaagcaattctcctgcctcagcttccctagtagctgagactacaggcgcgtgccaccatgcccggctaattttttgtatttttagtagagatggggtttcatcgtgttagcaggatggtctcaatctcctgacctcatgatccacctgcctcagcctcccaaagtgctaggatcataggcgtgagccaccatgcccagcgattttattttcaataaaggtgattcattaagtagatcacaaatgtaattgtgtatctgtgaacaaaagctttctcatataaataaacttttaactcaaatcctttatcagagcttgtgttatgattttatggttcggaaaatgtggtcataaagagagagagatgccttccggggggacagcagcgtctgccctgaagttccccaaaggatgtattatttatatatatatatatatatatatatatatatatatatatatatatatatatatatattatattatttagatatataaatatatatctaaatatatatctaaataatatattatttagatatctaaataatatattatttagatatctaaataatatattatttagatatatatatgggtgtgggtatttttatagagatggagtctcactatgttgcccaggctggtctcaaactcctggcctcaagggatcctcctgccttggcttctcaaagtgctgggattacaggcatgagccacggtgcctggccaaggatatattttaagtggggctctgaggggtgcctcaagcctcatcaggcaggaggggagttggtgggggcatattacacagccctggaagtgtggctcgtgggacaggaggaggctggggctggaagggaagccagggccagccccagacaggcctggaatgctacactgctgggatccacctctggcctcacaggctgtgtctgtgcctgcaggacggagaggagcaggaggagccgcgtggcaaggaggagcgccaagagcccagcaccacggcacggaaggtggggcggcctgggaggaagcgcaagcaccccccggtgagtgtcacatcctacacaccctcctgtgcacacacacaacacacacgtgcctggcctgtcgatggcagtgatgtatgtcctgcagggacctggagacatttaagaccaggtgatggggtatacccctccagctgcaggtaccccattcttcaaatcccaccctcacatttccctgttttcttatttatttatttacttttttactgagacggagtctcactctgttgcccaggctggagtgcagtggcgtgatctcggcttactgcaacctccacctcctgggttcaaacagttctcccacctcagcctcccaagtagctgtgattacaggcacgcgccaccattcccggctaatttttgtatttttagtagaggcgagatttcgccatgttggccaggctggtgtcgaactcctgacctcaagtgatccgcccacttcagcctcccaaagtgctgggattacaggcatgagccaccgcgcccggccacatttccctgttttctgcatagagaagtggaggccctgagaagccaggggacttggctggttggtcttgggcctaagacttggaccaggcccctgactcctggcctccctctggaagggaagcaagagggcctgccagaatcccaggctggactaagatctccctggactatctatgaaggcccctccctaccacactctcacccagggtctcagcccccacctggaggaagggaactgaggcctgggagtctgatcaaatgggaagggggagatgcaggctgaggagtctctgtgaggcagcaggagaaccagggccctggggaaggaagtcctgcaggcatgtaggctgcagggccagccccagcgccaggcttctgggaaccagtgccgctgaggcctgggggcagctctggagaacaagacccctgggctgtaggagcctaactggtttatgtcttaaactcagatgtggagcagtcattatttcccagcaccagagacagctggttcctttcttttaccccccttccagctgagaatggtaaacttggagcaagaaggtaagggggagtcagaggctctggatttgttactcagcccttcaaagaaatgttctcagcaggcatggagcccaggacttgctccctttgggtagagagccgggttgaaggtgactgaagtgaaatgggacagtagaggcggggggggtggtgagttcctggaggtggggggtgtgggaacctgctgtgtactgagatgcacccctgccagttctgcctgaagatttgaggcggggggcaggggggcggagtgaagtcattttactggtaagtaattttaaaccttttaatattaaagcaaacgtggatatgtaatgaatgaaattcattctggaatgaaaaattcacgtgatgttgaaaaataacacggggcttcagagaggactttctggctggcagcagactccagattcccagggcccctgcaccctcctctgcccacagggcaccttaatggagaaggtgtgggaggagagccaggccggagtcagagcacactggtgactccacatttgcagcgtgccctgcctctctcctgaggcttggcaacgtgcaatatgctaagcaaactccccctgtccccgtccagtttctgaggacaagagccaccacctgtagcaaataaagacccagcaaccctttgactcatctttgtgagtctctggaatcagagggtagccacatcgctgagaggtggagtgaagcactcgggtgaaaaggtacaaggaagtcagggacaggagtgtggggacatcacctagacaatgacagagaagaggggcacagccgagtgaggggagaggggccggcagtcctacatcccctggcctgaagcacgctccagggcagaaggaaaaacactgtctttggggtccaagagacctgagttcaaattctggctccaccactgaccacctgtgtaaccttgaactgctgctgcctgaacctcaggttccccttctaaaaatagaggagaaaaggatgcatttctccttgcccctgtgagaacgaaatggtgcaagcaccaaggagcctcagcaaaggtcgggcctgcccccgcctggccaaacctttcctcttcaggaggccacggcaaccgtagtttgacagaagagcagcaccttgatttaatgcttcccagcatgtgtccttgagcaagtcacctaacctctctgggctgcttcctcattgggaaaatatggctgccagtaaaacctgccctgtccacctcctggggcacttggcaaacagcaaaagagtccaaatgtgcaggctgggccaggcgcagtggctcatgcctgtaatcccagcaatttaggaagccaaggtgggcggatcacctgaggtcaggagtttgagaccagcctggccaacatggtgaaaccttgtctctacaaaaatacaaaaattagccgggcatgatggcgggtgcctgtaatcccagttactcgggaggctgaggcaagagaatcgcttgaacccggaaggggaaggttgcagtgagccaagattgtgccactgcactccagcctgggcaacagagcgagactctgtctcaaaaaaaaaaaaaaaaaaaaacaatgcagagctggctgtgtaaaaaacctgttccactgcagggcccagtgtccaccaggctggggtgcaggcctatggggtgggggcccagcatcagcctctcagcagccctgggaggcggggcgcatcccgtgcccctcgtggtctggatgtgttctagcccaagtcctaggttacacctgccgtcgcctggcctctcaggagaggcccagggtgaggaggagcatggtaaaggtgaagctgattgggaagtcagctgttgggaaagcaactccttgcacattggaggaaccgagaaagactgaccccgaggacagcagccagcatggcccttcctgggagcccatgttgggggattcctgctgcagccaaggctcagcccttgtggtcgcaggtgctggtcctggcctcttcccctcccatgcaggagcacaggagagatggcttctgaggacctgttgcagctgtggccctgggaatagatttgccagggagctttaaagcagctgagtgtgtcatccagctaagcctggggaaggagcttggctcaggtcctgacaggtgtgacagggatggggactgggaagtaagagatgaaaccctggctggaggctgtgagcttccacagccagcgctggacagggagggtccagatatacccactagtgccctcaccaggtcccacccccaagcccaagaaatcctgggctctctcctccttttgcccccaaggactgtctgtcttggccttcaacaggcatctgtccctgggtgccttctgccccctggcattgccctcacccaaaccagactccacctgccccttgcatgcccaggccagtgtgctcccttcacgacaaacactttccacttcctgagcactgaccatgtgcgggaagccaccagaggaagatgccttctatttcagtcaagtgtgctggagagaggaggccacacataatcacagtaaatgtagcaccggcacgtccttcttcaggaaccccccgggactccattttttaggggacaagatctgaattccagcccctcaccatctgaccactcctttccctgctatgcctgatgccacccctttggccacagaaacctcaccttctcactgctccccaaacacactagccagccattcctcctgcccgccccttacacagttccacagcctgccttctctccgcctgccccagcaccacagcccggtagaacctagcctgaaaatgaagcccagttcagccactgtgacccacactggcctttcccttctccaactgtctccaaagttaataaaaatgaactgataaagacaagttccaagcccaccgatcacacacatgggactgcagtggtctgcagacctcactttgagaagcatttgttgtcacctgtcggtacagaactgagtataactattcagaagcttttatgtgtgtgtgacaatgttgccacatccacgtgctgtgattttatattttacaaccgtatcatttcttggtgcactgagaatttaaaaatctggaaccaaagcttgagctttcatccctgacagtttgaaaatgcaccgccattgcatagtcgctgagctgtgccacactgagtttgcctgcctcactgaggacagagaccagcagtaaaggctcatggttatgcagcatgttactgcctacaaaggcgttttacaggggttaccttatttgatgctgacaaacctgcgtgaggtagttggggaccgctttcattatccccacattcagaagaagagactgaggttcagagaagatgatcaggacttggacttcacacctcccaactgcaaagcctatggtgctctttcctccttatcactgcatccgtgcagtttggctactgggtacctacccaggggttctctgtcagttaatatgtgaattcagggctgctggaaaaagtgtgtggaactggtccaaaaagcatacaaagaaaatggaactgaagagagttattgacacaaataccagggagcctgtgtgtaagtgccgaaggctgcagggggctgagggcaaagaggtgcgcctgcttaaaatcggcaacggcctagttgtctgcagcactggccagagagccaggatgctgcagtcagagccggcaacaggaaacaggaagtcagctgcagggcagggcggggcttaggaagggagctggcacctgggccagggcctgcgggctggccagtgcccatgatagggaggcgggggctggtgcgtggagctgagcccgtgtgtgggtgtgaggtggggaggaaggggcagcctctaaggatgttgcagggtgacaagtgtgggtgtctgaggctggttcctgcctggttgccagcccagacagtcctgcagaggcctttgtccttcatgggtggttccggttggagccctgaagggagagtttctgcctttgcccacaaggccctggggggtgagtggccctgtggggctccatcccctatttactagcgatgcgtatttattcattgacgatttatacccaccaacttcctccagggttatttttgctcagagggagcactctgaggtcacctcctgctaagaataacccagaatgggagggaggaggaggagggggctgggcgctggtgctgagctcagctgagcccaagctggtgttagggctgaccctccaacaccgcaggagtgagccagtccaagagggcaaactgccccacttcagagcagatgacttggggtaacctaaatggggaagtcagggaaccattctgctgcaggcaaaagtcagctaggtacagcttatggcagctcttggaggtttgcagcactggctagctttccagcctgataggacctttgattcttctccaagttaagacagagctcagcagccctgcttgttttcagatcagagccgctcctgggctaaccctccggacctcggctgggtgatatggtgcccctaccttttatgcatataacttcctgacatcgtgtctcccactcctgggctgcagcccttggcccacccctagaggtggcttttcttcctgcgagcctgcatcagtacacgctgctgcccactctgtctcctcatgttttggaaggcatgaggaagacaggccgacacactgcttgtgaggtagagcctatggttatgaaccttgcagctccacccacccactccccgacctgagcggtgaaatcaacgcccgctactggagtgctgcatggaagggcctagcccatggtggggacttaagtgcagtgggactcctaaggatgccggggaagccagggaagatggaggaggtggggcttgacctgggccttagaagggaggtgacatttggagaagtcaaggggaaagtgagaggcacccccgaccccagctgagctgggtgtggaggaaggaaggcatgcagggcagggtgagtgtggggaggcccaaaggcaggggccatgagcacacaggcacaggcctggctgaggggactagggattcattgaaaaatgtatacggggctgggtgcaatggctcacacctgtaatcccaccactttgagaggctgaggcaggtggatcacttgaggccaggaattcgagaccagcctggccaacatggcaaaaccccatctctactaaaaatagaaaaaagccgaatgtggtggcacatacctgtggtcccagctgcccaggaggctgaggcacgagaatcgcttgaacctgggcaggcagaggttgcagtgagccgagattgtgccactgcactccagcctgggctacagagggagactctgtctcaaaaaaataaatttttatatatatatataataaatagtagctgggtatggtggtacacctgtggtcgcagctacttgggaggctaaggcaggaggatctcttgaccccgggaggttgaggctgcagtgagccataattgtgtcactgcactccagctgggtgacagagcaaaaccctgtctcaaagaaagaagaaaaatcttctcaatcttgattggaaaggtagtttgcaggcagcctgaggggcttttactctttatcctctctgaaaaatgtgttatctggaaggttgtgaggaggcggatatgacgtgatgggagtcgtgtttgagaaattggctctggcacccatgagcatggcgttcatccctgagcatgagcacatgctgggagaggggagggggcaggggcgccagcaaagtcccagggcctgtggggggtggcagtggcggggcagaattggccaagcctatgctgctggccctgggaacgctggagaggaaggggtgaaaggaagccctagcaatggcacaacagggacagcatcagcgttgttgtcagagacaaggcttctggaagggagcagatggggaaggggcccctgtcaaggccaccttacatagctggtcttacttggggagcatttaagtagaatctcagaatctcctttttttttttttccaaaaataatccctctgtttattttcatctctccacatcccagggccaccttcagcgagtcattcattcccacaggtcctggccttggtggccttcctggggccccatgagcttttctagggcccgggctccacctgcattgttcctcctgttgcaggtacgcgccggcacacccattggaggagagctgttgacatgggctttctttcatcatccccacctagagaattttgtacattttggttctcctacctcaagaaagacataagcgagttggaaaagctccagagaagggcactaaattgatcaaggggaaggcaaggctgccaagagaggacaggctaaagagattaggactccccagtctgcagagacaaaggcagaggatgtgattaaggctatgaaatcatgtcgggtgcggcgggctgagcacagcacagctggggggcagagggaggacacccattagaaatttcagaaagataaatgaagcacagaaaagatagcaccattttccatggtgggttcccttcttaccaaacctgtcaccctaggattggcagaaattgaaaacagaagcaacttcaaaagagatttacttaacgtatgggatctctcatacgtaatggctttttttgtttttgtttttgtttttgtttttgagacagattctcactctgttgcccaggccggagtgcagtggtgcgatctcggctcactgcaacctttgcctcccgggttcaaacaattctcctgtctcagttttctgagtagctgggattacaggcgtgcaccaccatgcctggctaatttttttttttaagggtcgaagggatttattgaaaatgaaagtacactacacaatgtgagagcaggcctgagcatagggggctcaaaggccattttttttgtatttttagtagagatggggtttcaccatgttggccaggctggtctcgaactcccaacctcagatgatccgcccgcctcggcctcccaaagtgctgggattacaggcgtgagccactgaacccagccagcataatggctttttaaagggagcctccagctcactctgaaatcctttgaggttgacttcaaagagcacaaccaggcccttttccaggtggaccagtgtccccgctggaaacagaaccctgagtgggccggccactcaccacgcatggtcattctggcatccatttgccatggcttgtgacggcctagccaggccatggactgagtgacctctaaggctttgcagagcccagagttctctcctcagacacacgggtggagagatctctggggagaagggagacaggcagctcccagcagatgtggtaaggggaatggtaggacctggagggggtgcccaggctgggaccagagtttccagagtcggccctctgtggcctctggtcccgccatccctgaccccactggctgcgcttttagccaccccacagggaaaagggaaattggaggagtcagggtcctagctccatagcgttggagcttgctccatccaccccaggaaggccgagcaagggggcatctggggaccccctggcccctcctggagtgggcatggagcaggcatctctggctctccctaccacaggccacttccagctgctatcagatctctggtgagggccgccaggggaaagggggctgccggaagggcgggggcgggcagtcatggccccgtgccaatgcttcgggggcagagctgccctgcttacgtggacatgcagctgtttcctgaaactagagtcaacctggaaaaattcaggctggttgaggggtgatgggcctgcagagctgaggaactggaaggagcgaggagttgcggtgggagtggaggggctcactggcgtgtttgtgttggcatcacgcagcttccttgcacccctctgtcctgtggctggcagtgggtgtctgcaggcgtgggggtgcctccttctcaagtctgtgcacgtgacggtgaagagtccgtggctggcctgatgccagggttcccggttggcatggaatggatctcacagaggcattaaaagcaccatggcaggcccggccctctgggtgaccaaggtgaggtcgcccctgcatctgctgggctttgggggagaaggcaagaggagctcccagtgggaaaggaagaggcaggggaggagggagaatggcatctacccaccccccacccccacaggatcccccttccccggtgatcgctgcaggtgggctgcagcctggggacagggcttcttgccccaggtgccagggcctcatctcccctgtgccatgaccttcacctctcctcctcctggattttagtttttctgtgtaaataactatagtaaagcaacacttaaaaaccacttctggccgggcgtggtggctcacgcctgtaatctcagtactttgggaggccgaggtgggtggattacctgaggttgggagttcgagaccagcatggccaacatggcgaaaccccatctctactaaaaatacaaaaattagctggatgtggtggcacacgcctgtaatcccagctactggttgggactgaggcaggagaatcgcttgaacccgggaggcagacgttgtaatgagacgagatcacaccattgcactccagcctggagaacagagtgagactgcgtctcaaaaaaaaaaaaaaaaaatcacttccataaaattagctggatgtggtggcacatgccagtggtcccagctccttgggaggctgagataggaaaatcgttgaatttgaggctgcagggagctatggtcacacccctgcactccagcctgggcagcagagtgagaccttgtctcaaaaaaaaaattttttttaattacttccataaaaataaaaagttaggtgtggtggcaggcacctgtagtccctggtaaaactgaggcgggaagattgcttgagcccaggaattcagggccacagtgagccgtgatcgtgccaccgcactccaacctgagtgacaaagggatatcctgtctcttaaaaaaaagaaagaaaaaatcacctccccatattgggagtttcagacattgccccaccctgggacgcaaggctttgcctggagtgaaggaggggcaggaggtctgggtctggcccagactttgggcaaagggggaagaggaggcggcggcagggctggggaattggttccggctgggcaggccacagcagagggctcctccttgccttgcctctgtcttttgcttgaattgagcgctgctcaggggagggccagcagcctctgcccggcctttcttgggcactgcactgccacctctgccttctccaaaccctgggggcatttgtgagcttgcgcttttctgagactcaacccagagcgggagtcggccttcaaatgcctcgcctgtacctgagccatcctggaagctttactgatcagaggcgtgtgacccaaggcaggcctcagaaaagcgagtatcgctccagctcccctaggatccctgtgaaaattacatttattaattttataagcatatgtatgcccagtcctgtgtgggatgctagagagccataggtggagaggcctacaaagttaaataagattggccgggtgcggtggctcacgcctgtaatcccagcactttgggaggctgaggcggatggatcacctgggatcaggagtttgagaccagcctggccaacatggagaaaccccatctctaaaaatacaaaaattagccaggtgtggtggcaggcacctgtaatcccagctacttgggaggctgaggcaggagagtcgcttgaatccgggaggtggaggttgcagtgagccgagatcgcgccactgcactcgcctgggcaacagagcgagactcggtctcaaaaaaaaaaaaaaaagttaaataaggcaaggctcacagtcgaggagggaggccacagtaaacagataattagattcagaggtatgaattgtaaggagattgggtgagaaagggctttgtaaacaaacgtggcatgcattggctgggacaggagtgacagctgcggtgggttcacccccacccttcagggcaaggctgggccagcagctgtccacacctgccaactacagggggctgaggggtccagatccttccatttaaaggagcattcctttaaaatgctccttagaagacagaaagtagaagagtggtgactgggggagaggcaactgggaagttagtgttgaatggagacagtttccgtttgggatcgtggaaaagttctggagatggatgggggtaaaggttgtataaccatgagagtgtacttaaagtatgcttgaaaatggttaaaatggtaaatgttatgtatgttttaccccaggtttttagaagtttaaaaaagtgtttctaggccgggcacagtggcttacgcctgtaatcccagcactttgggaggctgaggtgggtggatcatgaagtcagaagttcaagaccagcctggccaagatggtgaaatcccatctctactaaaaatacaaaagttagccaggcatggtggcagtcagctgagataacaccactgcactccagcctggacaacagagcgagactccgtctcaaaaaaaaaagtgagcgatcttggctcactgcaagctctgcctcctaggttcacaccattctcctgctgcctccccagcagctgggactacaggcgcctgctaccacgcctggcgaattttttgtatttttagtagattcggggtttcaccatgttagccaggatggtctcaatctgctgacctcatgatccacccgcctcagccgcccaaagtgctgggattacaggcgtaagccaccatgcctggccaaaaaaagtgtttcttaagccaggcatggtggctcatgcctgtaatctcagcactttgggaggctgaggtgggtggatcacctgaggtcaggagtttgaatccagcctggacaacatggtgaaaccccatctttaccaaaaatacaaaaagttagccaagtgtaatagcagacacctgtaatcccagctacttgggaggctgaggcaggagaatcgcttgaacccaggaggtggaggttgtagtgagccgagattgcaccactgtgctccagactgggcaacaagagcgaaactccatctcaaaaaaaaaaaagtgttcctttgataaagacagtccctgtccttgcccctaccctcagcccagggtttttcaaagacattattgccattttgtctggactaaatctctgttgggggcgggggtgtcctctgtctggtggggtgtttagcagcttccctagcctctactcactagatgccagcacctcaccctaaccttgtggcagccaaaaatgtcttcacacacatgccaaaatgtcctggtggggagttagcaaaatcgccccagttgagaactacggccttaacctgcctcaaaaagctgctcacaggagaggactgaggaaaagccggaggcaaggtgggggttctgcccagaaggaaagcgaagattggcaaactcggagggaccccaggaagtggtgggcaggatttgaagacccaaagtgtggtataccgggtgggggtaggtggacagtgggtgataggaccaagctgtactgaaatctagaatgatactagattcacaaccctcctgtggcccccatctggccccccacgggaggagaagtgatgggtagttactgcggcttttcccattctgaaattgtcacctgcagctgcacctgctggtggtgccttctagaatggtcggcacccccaacccagccctctcccagataatgggcaacatgagtatctcgggggtgtgctgtgtctctttcaagatgactgtcaaaagcaaacaaaagcagattgtttaacagacatggcagcaaagctgaaactccctctagcttgagtgcaggaggttctcacttttagcctcgtctttgccattcacgaatcaattgtgaatattgtctgagcacctgtcaggtgccccactccctgctaagtctagccggatcgagcaaagtctctgccctccagatcgagcaaagtctctgccctccagaggtcaacaagctgtggagacaggggaaaggaggggaggagagtggctgggaggaggacatggagttgggggcagaagaggccaggcctggctggggtgcccctccctcctgggcttccaggctgaggtttctgcccttctcaccagggatggctccttcagtgagcacccagctcttccccagagacttggacagttgcttcaggccatttgactgggacctttttccttcctctggatggttttgtcctgctggtcaccctgagccccagagagccccattgaggggccacacttagcttgagggagttcttgatgggtaggatgaatcaagggttgagcgtggcagaagtcattgccctcccccccaaatcccagaactttggctgaatcatctcatccagaacctgagagagcaggtgagcaggaggggatggttgggcagaggatggtgtggaccagatgcgggagtggggatttcagcgggtgagctaacccggggctggaaatgtgcaacatgccccgctcgcccatcatctgcccagcatgcccggctcccacctggctttgggggcatctctgggagaatggcgcatctggtgctgttgcagactggggtccgcgggcaaggccagggcagggcttactcttgtgcatgaaggactgggttggtcgggagcctggggctgtgttgggcctcagagccggccctcataggtctctatgctacggagccagcagtcaacaggaagtgagtcccagcatgagaggaggccatgtggtcccaggcaggaagtgagtgacagtggagttgcctccagcagctttgcggggctcagagcctgccccaatctgaggtgtctgcagggcagcaaatgatgagaagaaaggaagacgcagccatgaaaaagtctggctctgacctaagcttcttagctcaagttagccaggcaggaccccacgcatacctctatggtagtgccatgttgggggctttggggtacctggaacagctggatcccagaaggtggctgcagtgcaggggtacactccacttttcaggctgctggggctcatgactgagccttgaagggtgacagacagggtttacaccagggaggaccattctaggctggaaatgccctctttgcttaagcagggagggaggagaggtgttctgagttctggggagggtcctgacacacaggatggaggcaggggtctgccgttccactttccttcccggatttggccttcctggctctgctggcatcagcccaagcccccaagcacagtggaggacttctcgcttttaccagtcacctcctcttcctctcgttgcagccccctgcctccaactgctgaggagtacacacatgcagctttctgtgggtgcttccctcctggaagcaggcctgcccagctgccccgcacagcaggaaaggagcttggcaggccctgcagttccttctgctccctctccggctgctccctgtgcccgggtccccatccagggaggaaagcatacctgagaagactctggttttgtttttgtttttgttttcccaaggcccttgtccctaattgccacctctgggcgttccttgccaaataacagtgggttgagagttcaggtcctagaccgttagagcaaaagcagccttggaaatagggctttgcaggggaggggctggggacccagtgctgtctcaggctgtgcacttgagtggtgggaaactctggagggaatttggcagtatctctgcacatttagctggacaggccctttcacccggcctgaccacttctggaactccgtcccatggaaacacgcagctgtacagagctgtaagtgcaagggtgttcactgcagtgaaaagcaaatcagcccaaatgcccaccatcagggaacggcatgcatacattttggagcatccagatccatctgcactgggatggagggatgcccactctgcttgttaagtgaaaaagcaagttgcagaacattacgactagtatgatacccttttggaaaaaaacatttctggatctgaatgtgtatatgaatacatatgtataaacatgtaacttacacatgattgtcaatgcataggaaaaaatctggaaaggatgctcactgaactgttaataatgggtaccttaggggagagattttgggggtagggagctgaaataggagctttaaccttttagcattatttttttttttttgtatagtcttttttttttttttttttttttttttttttagatggagtctcactctgttgcccaggctggagtgcagtggagcagtttcagctcactgcaacctctacctcctggattcaagtgattctcctgcctcagcctcccaaatagctgagatgacaggcatgcaccaccacacccagctaatttttagtagaaacagggttttgccatgttggccaggctggtctcaaactcctgacctcaggtgatatgtgagggagcctgcctcagcctcccaaagtgctaggattataggcgtaagccaccacgcctggctacagtttgatttttttatgatatatgtgactgacttttataagtagaaaaaaaaagacaagaaagacaaaatctccattggtctagaccagtcatctccacctgacaggtggggaaactgagatgctgagagcagtgccttccttatctgaggcttgccgtgctgatgctgtccctgcctttctactgggtaggtgttctgcatacggagccagcgaggcagagttgctgagtgcagcctggtgcctgtgggtgtggcagagtgccgagccatggggacccctgcctgttcctgtcccacactggacacctccattcttcttgaggtgtcctggcccacttgcctctggatggctgaggactgaatatatatacacagcagagcacacagcaggcacccggctctcctgctcttgctttgtccttgcaaagcctgtgacctggagcaaatcacaaaattccagagagcctcaggttcctcacctgcttcccagggaggctgagaaactctgaggaggtagtaagtgaggagctttgtccactgcgcagtgacacacacagacagccaggattattctttatttgatttttattacctggaaccttagcgagttcagttcttagactctaggggataaagaaatgatttcccttgaagggagaatgagagaccccagtgctcaggaagagttgttgcagagcctgaaaactgtttgccagagccttggctcttctgggtctgagtgcctgaaagaatctggggcggcccaggccaggggagaaggctacgctaggctatgagcctacagaatggttttttgggggtcctccttcgactctcatgcctcaagagaccaagaggaaagctgggagggcactgaccacagaagtcagaccagcctgagtcccagacttgatctggtggcactggaatcttctaagggagaggggggtcttattggattatgggtggcacaaggagcttttttttttttttttttttttgaggcggagtcttgctctgtcgcaaggctggagtgcaatggcgtgatctcggctcaccgcaaactctgcctcccaggttcaagcggttctcctgcctcagcctcccgagtacctgggattacgggcatgcaccaccatccccaactaactttgtatttttagtagagatggggtttctccatgttggccaggctgctcttaaactcccgacctcaagtgattcacctgcctcagcctcccaaagtgctgggattacaggtgtgagccaccacgcctggccggagcatttcttttttaacaggggctgcagagaaggcttggacgtcctatgtaacctcagtgagtggcggtgggatgggggagccgatcccttgagaagtgcaaccaggctggcaaacctgcttggattcttttcctgtttctgaagctggagtccacagactcgtgatttcaaggggtcaagcccaggaatcctttgatgttgaaagcaaaattgtgaatgtatctgtttgcatgaaggtttatatgaacacagtttctggacagaaagtgcataacattctctagaatttcagagcggtcaatgatccaaaacaggctaagcccactgatctaaccctcctcttgtgtatctttcttacatttgcaggtggaaagcggtgacacgccaaaggaccctgcggtgatctccaagtccccatccatggcccaggactcaggcgcctcagagctattacccaatggggacttggagaagcggagtgagccccagccagaggaggggagccctgctggggggcagaagggcggggccccagcagagggagagggtgcagctgagaccctgcctgaagcctcaagagcagtggaaaatggctgctgcacccccaaggagggccgaggagcccctgcagaagcgggtgagtcctcagcaccaggggcagcctcttctgggcccaccagcataccctgagagtcagggacttggctctccagcaggtcccaggaaggatggtctgggtcgtggctaaaggtctgcttgccaaggctatggcctggaggctactggctggatgcagcctgcgcatatgttttatttggcccatagagtgttttaaacatttaaaaaattagttgccagtatttaaaaatcaaaaaatttcacataaaaatctggagttttggcttctcatgaaaaaaaaaaaagctagatctggcaacagcgggctttcataacgccaacgattgctagactgggataatggcggtccctccatcgccttctgtggctggttgtgggccttagttttctgcagctctacctggcctgcttactctcccacgtgccatgcagttcctgggggttgctgtatttgtagcccctggcctgggcactcaagggcagcagataccctgtttgcctccctgagtgcagaggtcctgagcccaccctagttgggctgactcaactggaaatttggttgtgacagtggcgtggggagagggctgggtgattgtattctgtgtactgcccagcccaggcctcttcatctggggactttttggcctaaccctggaagcctggaaagttgcccacttttctctttcaggttaagccagcaatttcagggccaaccgagctgtaaacatgttagtaatgaggacaactagcatttgtacagggcttcacagtttacaaagcgctttctcatacattatcacatttgatcctcccagggccctgccaggttgttttgcatatgtgcattttaatttcaaaaagtcttccttccaagcgtgtatgatgaaatgagtaaattgattaattggcgtaacttattttgcatggatccaacctaatgttcatgcaggatagagaacatttccagaatacaaatttccaaacttattaagaagcttttattcatttattattcgacaaatatgtatgatgctcccactatgtgcagaacactacagagggaatctgtattagttgttttatttactcctctaacaatcttattcaagagatatgattatcctcatttcaggagaaaaatattgaggcttaaaacaatgatgtgacttgctcatggagccccaaccttaagtggcagatccagggctcattcagtcctggtcttgtgcctttctactattttccgctgtcctggaatgggacttggtgcggagacgggtcctgaattgtctaggcctcttgcacatattctgatacttcccgagagtgggaagggcctgaggggagtgaaacagatgaggaaagggagaagacaccatccttcccattaacaatgccaggtgtgtgagagaacccatcagccctgcccttccaaatgtggtgcttcccatgggctgactgcagttgacttcgcttcccaggaccccaccatgactcctgccgagctgctacccagggtcacggcattccttcctgccctgaagcatggagccatagccccaaagctgttctctggccttgagggtttgttttcactttgggatttccctacttccatttctagctgttctcaagggctcctgcatcgatcagtcaacaggtgtttcttaaaacacccattcagggtgtgctaggatccataccagggactggggaaactattatgaacaaaaacctgcttcttgccctcaaggacctcacagtcagctggagagacagacattaatgagaaatccacccttaaaaagatgagattacacatggagataagcgctctaagggaagtgaaacatgtccaggggaactgcaacgaagaacctgagttggcctgggctgtccagcgcgagctgaagggcgaagggagtccactgggtgaggggtagagggagagagtgagaacagggaagaaggctcccaggtgggagggagcagggcacccagggaactgatagatgtcacaaggctagagtgcagagagcaaaggagaagggtgtggaaagtgctggggcagacaggccaggccttcaaaggtggctgccggggtggggggtgggggggcggggaggcggggggtggggaggcggggagtgggcagtgtgtgtgatgtaatcagctttgcaatttgaaaagctcatgtcatctggatcctgggatggaatggaggagctgggaagcaggatgacatcggaggggctgatgagcaggatggcagcagagatgaagggaggggacaaatgccaggaacatgagaggtgagggagagatgctgtcaaggatgattcctgggtctgggactttcagacaggtggatcttccttagaatcttagtgctgagtgtggtgggcaaaaactctttaagtctccttgacctccaaaatttggccttgaggctgggcacagtggctcatgctggtaatcctagcactttgggaggcccaggcgggcagatgacttgaggtcaggagttcgagaccagccgggccaacacagtgaaaccttgtctctactaaaaatacaaaaaaaaattagtcgagcttggtggtgcatgcctgtagtcgcagctactccggagtctgagacaggagaatcacttaaacccgggaggtggaggttgcagtaagccaagattgtgccactgcactccagcctgggcaatagagtgagactccatctcaaaaaaatacaaaaaaaaaaaacaaactttggccttggtacactcctgtgtggtcccagctatccaggaagtatagattctggcagggatcagagctggtaggatccctgaaggccactgcactgcctggaagctgaaattggtgagatgttacctcgcggggtgggcagtggcctaggctctgccaatatgcaacggacagtggcttaatcagggtgtggaggctcggtcacggttccagcagtcagctgacatagaacacatgctcagctggttgattcagatgaggaaggagactaaggccccggagaggatgtggctcggccgtggtctcctttcagttccccttattccaggtctcttttcaggggatgctctcctggaacccctttcattagctcctgtacagcaaaaacagactttttaaggcagcgtttcttgtagcctgagcatgtgctgaaagtacagccaggagaaagaatcaggaagacgggagatgatgagatgagtgatagggacaggagccaacacccgacaggcctgtgcttgtcttgggtctgttcctgcccccgccagcattaatgccataatgatgatgattcaggtggcagtggcgatgtggctttcccttattgagtattgactgtattgggcattctctctcctcgctactcacagtggtccatagaccagcagtgttggcagcacccaggaatttagaaatgcagaattccaggctccactgaagacctgctggatcagaatctgcattttaaagagggcctcatgcttcccatgtatatgaaagtttcagaagctctgctgtgtattatgccccatgtgtgatcacgggaggaagatttttttttttttttgagacagcgtctcattcactctgtcgctcaggctggagtgcagtggcacaatcttggcttactgcaacctccacctcccaggttgaagcgattctcctgcctcagcctccggagtagctgggattacaggcgccagccaccatacctggttaatttttgtaattttagtagagacagggtttcgccatgttggccaggctggtcgtggactcctgatctcaagtgatctgcccaccttggccttccaaagtgctgagattacaggcatgagccactgcactcagcctggaagactcttattatcctcatttttcagatggggagactgaagcttcagaaaggttaaattacttacccaagattatgcaactggtgagagaccggattagggtcagcacaaaacccctctctactctgagcatagggccccttttcaggccagtgactgccctctgaggtaaacctggctacagcctggtcatggagatttgagttcattttaaagagaacttgggtggcctctggctgagtatagctcagactcgaaggcgagtgttagaagcaccctggcctcccctgcccccaagtcctgagatgcactagggtcatgttcgggcctgtcagggccacactggaaggtcacaaccacctggccctggcggtgaccctgggcctgggccaggagcagttgggctgcataggccgtactgagagagcagctgaccctccctgactcacgacaagtgccgcattccgaggcggcccggccaggctggaaagcgtgtgtgtctgtgtgtgtgtgtgtgtgtgtgtgtgtgtgtgtgtgtgatcactcaagtgggcatgcgcagagtctgtcagggagaaaattccagaaagaagccagttggaaactgcatagggaaaaatcgttctgttttggggagcttggggggctgggaaattaggaagggggtcacattgagaaataacagtagtggtgcagcggagagggagcttgccggggcatcaggacccctgaaaagctcatctcagctccggccttaagtcactccaccccccaggtctcagctttctgcaaaatttaagtgctgaacaagtactcaatgatctctgcaaagcctttcaaccctgattttctaatattctaatgaataaataattatccgtaaaagtaattaaatgccatggagggtcccaagtaggaaacgtttgaggttctaaagcgggctggggagaaaatgcagtcggaagccccaagtccaggtccgagagccagcccgggggtcctccactccccgccctagccgcagggctgacacagtggttcccagcgccaccgcgagccccggagccccgccgcgtcagggtccgccgggaccgccaggccgcccccaggccgccacctgatcgcgagcaggcgccccctgctgggagcccggggcctcaccgggcagagcaacgaggtctgggaggagggggaagccctggcctgggaacggggaggccccggacaggctggagggggcccccgcgaaaaaagtggggagctggctgtggtgggagagaggacggaaaggaaacagggaggcagagccagacaagatgggtgagacagcccttaaaaggccggtcacgaacaaagcgctggcgagtgcgcgcccgcccacgcgcacaggtgcccgcgacaagacgccccgtccccgcccacgcggcccccgcgggctgagcccggcgccaggcccgcacccacggtggccctcctgcctccctccccctggtgctcccgggcctagctagcgggagtcgctgtcaccagggacagaaccacggaggacagcgctgtcctgggcgcccggggtcagcccaaaaccagtccaggacccccctgtcacgagggaagggagtggcctcccgggctgaggacccgcggcgtgaacactgtggctggcttccgcttcacagccaggagatgaagtcggggctgttttttccgtttcaggctctttgtctccccccaccccaagctaccatgagccagccttagtgaccttcctgcagtgggcccaggcccgatacgctgtcggttcccgacaaagaagctcaggggcccaggtggaaggagggctcacttccccacctccagcaagaagctatgggaggcagaatcagccagccccgcagcctccggggcgctgggcctggaaggggtgcctggaaagggtggtgaggacctggtggggagtgcagggggatgcctgggaggagcgcagctcccctcatgctgggggcttggagaagcacagggagagggcaaggtctcaatagggaaattgagacttccctgccaggacctggaatcagggcccagtagaggaaatgaatccttagggaaggagaaccacactaacatgtattgagcacctacagtatgccaggccccacagtaggcacttaatgctcaccataacctaatgattttagaacatttatctaccttgattcagtgggaaaacaggccaggagaggttacagaggtcacactggaatccaaactcaagtcttctagattaaaggctgagctcaggggcctgagcatggggcagggagtggagggacggagaatgagattagtaatagaatcataatatttggacctgcaggcggaccttggaaatcgcatccagcatccttattttccagatgaggaaactgagtctcgtagagaggaagttgcttcaccggggtcttgttccagttggcccggtacccaccgccccccagtacatgcccttatgcccagaaggcctctgcaaacactcccttgcagggccagggaggccgctcaggctggccctctggcccaggccttcctgcaccccctcctccttccgcaccccctctgccttcctgctcctcctttggggaaggaggtctcttgactgggagcagcagaatgggggtatttttagtccccttctgtgtacctgagacagagttgacaggccagaaacccagctctgaatttcctcgtgttccctcttgcctgggcctcaaggcctgcccctgcccgagttctttctctgccctaggccctgctgggtcctcagggtcagcactgtgcctggcatgtggtgggccatcatatttaacacatgaacagctaaacggccagaggacccccatcccctgtggcagggaccccaggcacaaggtggggcctgtgagccactccagtaattctgccgaccaacgaactggtccctttgttcttccctctccacaggcaaagaacagaaggagaccaacatcgaatccatgaaaatggaggcaagtgttccacccccaggggctctgtggatcctgattctagaagaaggacacgggtggcgagtgtgtgtgagggggcggagggtgggcccctcctccttctttacacatccctctgtgggaaggagaggaagtgggcgtggaggttggaagtcccccaacaaggcagccggctcatccccctccagaggccagacgcctcccttcgtggcctgtggccgtgtccatgtgcccccccacccccgccacacatgcccctcgctcctccagcccacacggggcctgcccagcactcccaggggtgccctctctggccaggagccagtgtccacattgtgtttgaggcgagtgcctccttggtgggtccgtcagtgcccaccctaatgccctaatgtctgtctctctgtcctagggctcccggggccggctgcggggtggcttgggctgggagtccagcctccgtcagcggcccatgccgaggctcaccttccaggcgggggacccctactacatcagcaagcgcaagcgggacgagtggctggcacgctggaaaagggaggtgaggcgccttctggcctgggccccagcccgtcctgcagaactggaaaaccagaagtgatgggcctcagtttccccttcaggctaacccttagaacttactgggagcctcttaatctctagtcatgatgactggttcatctgctccttcagcagatgcttattgaacacttactgtatacctggctgtgtactagaccctgggcgtatacggttcctgctctcatggagttgacattctgatgggggagacaggcagaacataaagaaacaaggggctgaaatagaagatagcagaggcctgctttagttggggtggtcaagacaggcttcttggaggaggtggcatttcagttaaggtctgaaggaaccgaagagctggctctgtgaggagtggggtcagggagagtgttctaggcagaggaaacagcaccagcaaggccttgacttgtttggcaaactgtatgccagggtgaaatggcaaaggagaaagggccagatgcagccagagaggcaggcggggctccacacatcagttggagacctgcagagtctgcccaaaagctggcttacttctgacaatactgggcagccatagaaggtttctgtgcacaggaaggatgtgatgtggatttgagaggcagcagtggagacagagaagagctttggggtgtattttggagctagaatagctagggcttgctgatggaccggcagggaggggaactggtggactcaaggaggactcacaggggtctggcctgaacacctggtgatggttgtgccatttgctcagatgggaagacccaggggaggatgagtttgggacaggtgggaattgagggctccgtgtgagatgccaggtgcctggagtctgggctgtagggaagtacgggcgacagaggtgggatttgagagcagaaccctggcatttaaatccatgggaacttaagggctcagcaaggggagaaggaggagagacgaagtctcagaacatgtccatgaaaaccccgacatttctgggccacatggagaggaggagtggcaggcagtagggactgagggagaaagcagtacagagcggtgtctggggaagcacggggttttcccagagggtggctgcccagccctagggaaagctgaattcactgagacatgcccatggcgttggacaacctggaaaggagctggtgactttatagagaagcttctgtgggggtcggggaggtgggaacagcccgtggagggcttcagccatgcagagaggtgagaaaatggaggctgaaagactgaggagggaaatcaactcgccacgcacaatttttgagctgtcttgtatgtttgattagtagagaactgggtacaaagagaagtgggtggtgacctagctgcacaggaaaagagaggaaactgccaccacgtggggcacttcacgtgaactcagctctcatttcgtctttaccccaggcctccaggggaaggcggccctgtttgtctgttcgcctttgtgtgagagctttctctagagaaagtgcagaacagaggccaggcgcggtggcttacacctgtaatctcagcactttgggaagctgaaaggaggtcaggagttcgagaccagcctggctagcttggtgaacccctgtctctaccaaaaatacaaaaaattagccaggcgtggtggctcatgcctgtaatcccagcactttgggaggctgaggcgggcggatcacctaaggtcaggagttcgagaccagtctgcccaacatggcaaaaccctgtttctactaaaaagacaaaaaattagccgggcatggtggcaggcgcctgtaatcccagctactcaggagactgaggcaggagaatcacttgaacccgggaggcggaggttgcagtgagctgagatcacaccactacactccagcctggacaacaagagcaaaactctgtctcaaaaaaaaaaaaaatacaaacaattagccaggtgtggtggtgcgtgcctatagtcccagctactcaagaggctgaggcaggagaattgcttgaacccgacaggtggaggttgcggtgaggcgagattgagccactgcactccagcctgggcaacagagcaaaattccgtctcaaaaaaaaaaaaaaaagagaaagtgcagaacagggtgggggttctggctgcttgattgttttcttttcctctgggatccaggaaggcagaaattactttcccggaagagcccggagaaagggcagcctgtctgaggtctgggaggagaggcacttacccctgtgcgtggaatgttgtgtttggggtggaaattcaggaatggggctcttctctccaagtcagtcgctgcactcctgggttccccgcaacccagaaacaggggctttgctttttagctcctggttctgtgagcgaagtgtttctgttctcatttagccctggggcaagaagcttagactatgacttttaggaaccggaagaactttcagaaattccatgattctcaaactctgctcccttgaagaagcagtatggaggcctgccctcagttacagtgaaaaaaagggttctttcctcaactcccaggaaaaattagatcatagatacattttctcaattttaggtctctactaaaatttaaaaagacttttttgggctggacgcagtggctcacacctgtaaccccagcacttcgggaggccgaggcgggtggatcaccttaggtcaggagtttgagaccagcctggccaacatgttgaaaccccatctgtactacaaatacaaaaattagctgggcatagtggcgggcacctgtaatcccagctacttgggaggctgaggcaggagaatcactggaacccaggaggcagaggttgcagtgagccgagattgtgccactgcactccagcctgggtgacagaacgagactctgtctcaaaaaaacaaaacagactttgtaaaactcatgaacattttctaacatatgcagaagcagagagtagtgtaacgacctcccattgccatcacctggctccagcaattatcaaaagattttctagtaagtcttcaacccttggcatttgcatccccactcccaaccaatgaaggtagcagtgggcattattagaaaaaccaaaatgttgatttaatttaaaagactttagtacacttgacttgcaatgtggagatctccaaacaaaatatattttctgctaataacattattccttattcctatgctgtaattaaagaatccatgaattccagtacaagttttagaactactgatctcattttcagactaggggacttggggctaccgagttttataactggccacaagctcccaatgaagaattgggaacaggactagaatggaattagaatttacgtttcctattccaatgtggggcccaggccctgactgtcacacagtctcctcctgggctatgcctggggttaggaaggggctagatgcaggtatcaagaatggggaaaacacaggtagctttcaagattcccaagtcgccctcagactcaagagtagtagctgttgctatcaggcctgttttctttgtttgtctgtttttgagacggagtttcactcttgttgtcaaggctggagtgcaaaggctggagtgcaatggctcactgcagcctccgcctcctgggttgaggcgattctcctgcctcagcctcccgagtggctgggatcacaggcacctgctgacacacccggctaactttttgtatttttagtagagatgggggtttcaccatgttggtcaggctggtcttgaactcttgacctcaggtgatctgcccgccttggcctcccgaagtgctgggattacaggcatgaatcactgcacccggcctatcaggcctgtttttgttttttggtttttgtttttttgagacggagtttcgcacttgttgcccaagctggagtgcaatggcacaatctcagctcactgcaacctccatctcccaggttcaagcgattctcctgcctcagcctcccgagtagctgggattacaggcgtgcaccaccacacccggctaattttttgtaatgttttctaagtggtgtaacaacagcacagacatttctcctcttttctcagtctcattttgctctctgacatttgagcccttctgaaactgcctccctgggccttcccaaggccgctgcaggttcctccccacctccttcagctgatctcaagcggcaacctctgttagctgcatccccagatctccaccccccaccctctgccagtgttgatccactgaccccttacccaccctcctagatccaagtaccctcctcctcccaaaaaaggcacctcccctcctgacaaaccacccagccttcaggacccagctccagctgttccccaggcaatatcacttgaagggccagccagcgcttcctaatctcagaatgcaacgcctgcaacctttcattcagggcacctttactgagccggtttccagaagcctccacagctgagtgacatgtaagatactgggactaccagaggcatagaggattcctagttttcccatgataggatgagggctcatagcacctgcagaaagagctgccctgaatggggcgtagacgaatgctgcctggggtcatctacgcatcagcaggggtggcttctggcttttgacggttgaactggaatttaggggagggctgaggaaggcatttcagagggaggaatacagcaggcacatacctctcgaggcacaagacacttgggcttttcaggaatgggagtttgttgtggtggtgcacagcgggtgtgggcagaaagcagctaggaaatgtggctggaaggtggggcaggggccagaaggaggagctgccaccagaccccaggctgcaccagcccttcccctaggctgtgtgccccacctggggggcttcttccctgggaacgcactccccagcttaacttccttctccttgcccacccttgttggaccacagttactgagtgagcctctcccagattacccccttcaggctttccctcccccaagatttaagacgactcagaatgtcacaaaatgaaagaaatggaaaataagtgaacggggaaaatgagacatttctgcagtccctgaggctgaagtgagaattcctgctggagctgggaaggaagttgttgtcttctgtctgttccatctcctgttgctgttccttcacctgcttactagtcctgtaaggactaagctctgttttaatcatgatcacaccctgccatagaacctccaatggctccccattgtctcccccatcatgtcagataccctctggctatttctcaagtcttcaacccttcgacctccacaatcagcccaccccactttcactacagtcctctaatagaagggtgtcccctaggaagggacattgccatgctccttccttccttcctgtcatcgttcctgctgtgatttccccagtccattcttcagggttgaggccaagagctgctgcctcctccaggaaggtttccaagatttctccagtccacaatgacctcttcccttccctgaatccctgtaaccctcactggggtttgtttgtttgtctgagacagtttcactctgtctcccaggctggggtgcagtggtgcagtctcttggctcactgcaacctccacctcccaggttcaagtgattctcgtgcctcgcctcagccttcccagtagctggaattacaggcacgcaccaccacacccagctaatttttatattttaagtagagatggggttttgctatgttgacctggctggtctcgaactcctgaccccaagtgatccgcctgctttggcctcccaaagtactggaattacaggcatgagccactgcactcagactgtccttacggttaatattacttagcactcaatcatatttcatcagggtatttttcactgtttcttatgtgttgatcacatcttcctctgtctggcctaatgcaatgggcagggagaacaggcccagtgaatacctgctggctggctaagcagttgggaggtaggtgaatgtgggaccacttctctgggaacatgagatcttagatttccaccatgacaagggcccacacacttgatttcgaggtggtttttccaggggtgctgacaggtgtacctggaggatggcatggggactggtatggacagcctccatgggtaaaggggggccagagtctcctccatcctgtattcctgccattctcaccaggcttctgagctgaggagaaccttccttggcctggcagagctggccagggctgtggggagggcagggtagggcagttcctcctcccaaaggaaggcactcccttagctcctcttccttctaattctcagagcaaaatgcactctgatggagggcttgagggttaggaagggcctctcgcttcattagccctccctgtagctctgcaaggcagatgagcacagagacccagggtcagtagctgggcggtcatctcgcctgggaagccactcactccagtttgtgtcgcggctggtggttttaggactcagttacagcacattgatggcatgactcgctcattaatctcttcaccccagccggattctaaattccgtctaggcagcgggtaccatgtcctattgttctaggatctggtctctttcctgcttccgacctgaaggtagggacccttgactcatgcatccttatacttattagatgcttaataatattgaatagtgataatgaaacatctgtgactggaacatcatagtctctcctcccttccctcgccacactgagatacaacccactccctccgcccagggctgcccagcagatagcagagccttcatggaccttaagggttggctgctgtttactgcgacctttggaggcaagttcaaatactgccttaagaaaggtcccacttactgggtgtgggaccttaggcatcacttaccctgtaccccagctgaggttcctcctctgtggatggacttggctgtactctgcatctccatgacagcagcactcgccagcttgttttctgcctctacccatttctgcatttaagctcgttcaatacaggcattctgggcaccccctgcccccagggctggcatgtgggaggtgcagggtgaaagtgtgctgaatgaatgaacaattcttatctcagagttgtgtggacaacacacaacatttaaagctcctagcacagagctagcatataataggaactttataattttttagaaagtattttaaattacataagtattacacaaatacattcttgtgaaaaagtccgcccaaacttgccaccccaaaattttattttgagacagggtcctgctccattggccaggctggagtacaatggcatgatcatggctcactgcagcctcaacttcttggctcaggtgatcctcccacctaagcctcctgagtagctgggaccacaggcatgtgccaccacacttggctaatttttaaattttttgtagagatgggggtctccttatgttgaccaggctggctttgaactcctgggctcaagcagtccttttgcctccacctcccaaagtactgggattacaggcatgagccaccacacctggcctgaaaatttaattccttcaccagaaatacttgatgctatcagtttggtgtaacgtcatgattttttcctatccgtgtgtatgcgtgtaaatatataattttgcttcaggggttctttttttcctgttctttttacacaaatggaaccacactgtagtttcattttacagcttggtttttgacttccaataagtctgtgcaatctagccacgtaattactattatattccaccatgtggattcccatggttttatttagccattctgttattggtggccatttatgttgtttatgatattttactgtttagcattgcagcggtgaacatccttagtcatacctctttgtgcatctgtttctctaagacagatacctagaaagaaaaaggcctagctgaagggaatgtgcattttacattttatgacatctgccaaactgccctctaaaaagggcactccaatttatgcttctgtgaacagggtatgagaagacctttgccaacatcaatattttgctagtcaaatgggtgggaaaatagtatcttgttatgcttttaattggcatttcccagataataaggttgaacatcttttcctatgtttattggccatttgtgctgctgcttctatgagcttagcaaatgttgcctcctctgactttacaaccctgcagtctcaacagactgtgcttcctgtctgccctgaggagagcaggccatgaatgtccagaaggtcccccatgctgtgtcatattccatttaataagcagtcactcagcacctactaagtaaaggggccttgtgctaggggctatgggaaggaggagataataaggtgtgatctcctgggctttagtctagttcaggagaaatggaagtgcaaagtagaccagtaaaggctcaaaacaaattattagccaactgtatgggaagcagttttagagcatttggactggaagacattcctcacttatttgccctacctgaccttttgcagcgtggcctcaaaaataacatcacccttgaaggagatgatgatgtttggagtaggcacagcaagtatactttacccaaggctgaacaagttctagaggctcccatgacagcctgtaagcagtagtgacttcgagggctggcctttaccataggctactaaagttgccacagagggactccccattgtcctttaagtagatgggttggttgcgcaccagagtcttcacttctggggcacagagagaacagctcttagaacaacccctactttttagtggtgagaaaaaaagaggcagggtggggtaggtgactagttgctggcccagggccaactcctggccacagcaaagcctgaaccagggaaagggtgttgaacttcactgagcacctactttacatcaggcactatgccaggagcattagctttcaccacaatcctaaaacatattatctgcatttaatgtcttttttttttttttgagatggagtcttactctgtcacccagtctgaagtgcagtggcatgatctcagctcactgcaacctctgcctcttgggttcaagcgattctcctgccccagcctcccaagtagctaggattacaggcacctgccaccacacccggctaattttttgtatttttaggagagatggggtttcaccatgttggccaggctggtcttgaactcctgacctcaggtgatccacctgcctcagcctccaaagtgctgggattacaggcatgagccaccgcgcccggccagaagtatttttttaacctgtattttgctattagaaaattaagatttatctaggtaagtaggttgcggccacatgggtatcctgatggagtggcccaatgggcaaaactagactccaaatctcgtgttgcttctgttgtgtacccaaatgactaacctacactcccagttttcctggtttcctggcttggaaattgtcatgaaattgaagaatgcatttagaagagagggagagagctggcccggctttccagcctgccgcatgctcttcccgcccccggcctgcagttgttggggctgctccccatgcctctttgccaggaggctcaggtccctttcagcctccccgaccacccctccctgctctactcatgtggtcctgaacccttgcccttgaattgctgttttttcatgaccatgtggatgatgttgtgaaactggattaagaaaatgttggaatgagatttgggaggcctggtttctcgtctcagcttctgcccctccttagctatggatgtgaggaggtctttctgctttcggcattttagtttcctggtttataatgcgacagaaatagatgagatgaccccagagattctaaaattccatcacggcaggttggggggtgagactggaatcatgatctgcactctctttattacctagattaccttgtacataaattctaaattaaatatttgagtgaattctcagacctcgcatatacgtctcttctaaaggcacatacgtgaagcatccttataaaaactctttttggccgggggtggtggctcacgcctgtaatcccagcactttgggaggcgaaggcaggcgtatcatgaggtcagcagatcgagaccatcctggctaacatggtgaaaccccctctctactaaaaatacaaaaaattagccgggcgtggtggcaggcacctcccagctactcgggaggctgaggcaggagaatggcgtgaacccgggaggcggagcttgcagtgagccgagatcgcaccactgcactccagcctgggcgacagagccagactctgtctcacaaaaaaaaacaaaacaaaaaactctttttaaaaaaaaaacctttggcccagcacagtggctcacgcctgtaatcccaacactgtgggaggccaaggcgggtggatctcttgaggccaggaattcgagaccagtctggctaacatggtgaaacgccgtctctactgaaaatacaaaaattagctgggcgtggtggcacatgcctgtaatcccagctacttggaaggctgaggcacaagaatcgtttgagccagggtggtggaggttgcagtgagtcaagattgcgccactgcactccagcctgggcgacagagcgagaccttgtctcaaaaaaaaaaaaaaaaaaaaaaaaaccaaagggttgtccagcctttactgagcagatactgtgtgctcagtctttaagataccaccttgtgtgtctgggtgtctactatgttccaacattttctagacactaaggaagcaaatttaaaggcaagtcagaattctaccctcccctgtgagaggttggtaggtaaatgaatgaattgtgctgtagccagggcagggttgttttagaaatactaagggaaggactgtgcaagcaactccctagccctgcctaagggcctcagggaaggcggtgcctagggagaggcagtgtaccgccattgacctgaacaggactgcttggcagggacagtgggggaagggcatggagtggggtcctaagggaggtggtcaaagaaatcctctaggagtttggagtctagagtgcctcaaagtttttcccatagcactgtctatggggctgacaaagcagaaaatataatagccaatgttctctctgctttaaaaaccagactgcttgtcagggaggccgtgggatgttcacatatggggtggtctgccagagccctctgccgctttattaagaggccagtacactcgttaaaggagttaatggacctcagtacttactactgattgcttagtaattcagtacttggtaaataaacatgatactatgctagtggcggggtagggggagaccaattggatatagtccctgtcccagaggcacacattgtcaagtggaggaggcaggaatgtttccaacaagcctcagtggcagtcagagcgtggggcttgctctgtgctcctgtgtaaagagcccaacatgaagcataaaggagcatgagagcagcttctggaggactccaggaaagcttcctggaggaggcaggcatcctttgagaatttcagtaagtgcaaaagaggctgggtgcagtgtaatcccagcactttgggagaccaaagtgggaggattgcttgagcccaggagttcaagagcagcctgggcaacatggccagacccactctctacaaaaaaaatatttaattagctgggcatggtgttgtgcaccaatggtcccagctactcaggaggctgaggtcgaggctgcagtgagccatgatcatgccactggactccagcctgggtgacagagtgagatactatctcaataaattataaacaaacaaataaaaaagtgttaaagaggaggaaggcatttcaggaaaaggaactactgagggcaaagagaaggaggcatgacttctgggttgtttagggagtagtaagagatctggtaactagggtgcaggggttagggaggatgggcaagaagagacagaactagaaagcaagatggtcacatcctcagtggtcttcctgccatagtgagaaatttaggcttcgttgtccagtggagagcaggggtggaagagaattggacacatagtttaggaagataacctggcaggacaataagtattccccagagagaggaagtttagaagcaggaccaggtaggagaacattacatttggccttgactgagggttgaggtaatgagaggcaaacttgaaggaattgctagaactggtcctggttggaggggagggaaaaatttgtctggtattgggagctgggctggggatagggttcattatctgaggtagagaatcttggaggaagagcaggtttgaggcaggatgatacagtgaacttttcattttcttatgtattctgatgagcagaagtttttaataaagtccaacttacccatttttttcctttattggttagtgtttgtgtgtgttatctctaagaattctctgtctaccgcaaggtctttaagatattttctcttaggagggggtggatttttgagctagggtttggataagctgcttttgagaagccagcagattggtgtcaatggggacaggttttttttttttttttttttgagacggagtcttgctctctcgccaggctggagtgcagtggcacaatctcagctcactgcaacccttgactccctggttcaagtgattctcctgcctcagcctcccgagtaggtggggttacaggcatgtgctgccatgcccagctaatttttgtatttttagtagagacggggtggggtttcaccatgttggccaggatggtcttgatctcctgatctcatgatctgcccaccttggcctcccaaagtgctgggattacaggtgtgagccactgcgcccgaccccaggggacaggtttagtcagattccagggtggtcctcatggaggggacgcacaggcaggagggcagggagagaaagcacagaaagcagacctgctaggagaggaccaggatagggaggggcagggacaaggacatgggacttctgggagcaggtggccgggggtcaacgtccaggaggatttcctgaaccagttagaggactactgaacccccctttcacctatctatgcagccctttacttttacaatatatacatttctatttattttatttatttatggtttttttttttttttgagacggagtctcactctgtcacccaggctggagtgcagaggtgtgatctcggctcacttcaacctccgcctcctgggttcaagcaatcctcccacctcagcctcccaagtagctgggattataggtgtccgcccccacctctggcttttttttttttttttttttttgagacagagtctcactctgtcacccaggctggagtgcagtggcatggtcttggctcactgcaacctctgcctcccgggttcaagtgattctcctgcctcagcctcctgagtagctgggactataggcacacgccaccatgcctggctaatttttgtaattttagtggagacggggtttcaccatgttggccaggctagtctcaaactcctgagctcagatgatccacccacctcagcctcccaaagtgctgggattacaggcatgagccaccacacttggccacctctggctaatttttgtatttttagtagagatgggttttcaccatgttggccaggctggtctcgaactcctgacctcaagtgatctgcccacctcggcctcccaaagtgctggaattacaggcgtgagccatcatgccgggcctacgttaatttttgagacagagtcttgctctgtcgcccaggctggagtgcagtggcatgctctgatcgtagctcactgcagccttggactcttgggctcaagtgatcctcccacctcagcttcccaagtagctggaattacaggcacgtgccaccatgccctctgtggagccctttctgacttccatcaactccctgcgaccaccccgcatccttcacctctcagtccgcactccctcccaggccaactgcatggtgagtgtgtgtgtgtgctcccaggccaactgcatggtgagtgtgtgtgtgtgcaagtgtgcgtgtgaatgttaccatttttctgacttgccattcttcagtagcaactctacagatgcgacagctcttccccgttcctctttagtccatgaatggtgggcagtataaatattattttcacttgcaactcagatggattgaacaaaaacaggaataacagctcagcctcctgtatatttgacgctagatgctgttggaaaggcagctttgtggggcaaaaaaaaacaaaaattgagtgagcttgcttatatataccaaagatgctcttagacttcaatgtttctcaaagggtgagattgtgtgttacctcaccagaaccacctgggcagtgcattaaaaaggcacactcctggagcagaagctctgggacagtacttgtaggtttgattttctagccagcccccagatgattctggggcttactacagcttgaaaaccaccaagcctcagatgattagaggtaaaccaaatctggcacagatgagattcccacacagatgtattggtagatgcatttattgtatcgcctgcattggcggcgggggtctctctacacattttgtttaaacctgggccaggttaatcacgttgggaatttagtgatgtacccagcaagggtggtttcccaagctctccgggtaattgatagggcttgggttgccagtctgattgtggtaacaagcaaaggaagaagtagggactgtaaggcgggcagacctagggaacagtttccaaacagggttgggggggaaagaccggaaaggacttggtacaggaatttaaatgtttcctttcggatggagatggcaggggtcctgctgttttcagcaatagttaccgcagtgcctgtctgctgggctcctctggagtcttctctttggaccctgaaacttgagagggtctgcatgcctgaatctgaatgcggctcctttaggcccctccctttgacccctggagcctggagaaggggtgggggaagggtggggaaaacaggcctggctgttaaggtttaccaggttccttttggccacaccccccttagtataaacttaacacttctctccagggtccagtttctaaagcaaagtgacagcatcgacacgtccctaaagcaaacttgtcatgaagtccctcacctctcaaatgtgagtccctcctggcttcctttgattttatctgtaatatttagcagatacgtgtgattctattaggctagttaggaaaccaaggcccaaagaagctaggggttatttaaggtcttgtcatcagctgtaaaacaccctgctcagcgccctgctcagtgaaagacctggcatcccctcccagttgaatttcctggtaaggggcacctgagatccggtatcagtggggtactgctactctcccacccctgccctggcatctctgctccctggccccagactccgtcactggtagagctgggcagacccagcagttccaggatagcgggtggaagtgagcaggaaggaagagctgggtttgtggagaagccttccccttatggggcaggctatagggaaagggaaggcagccaccaaagctccagagcctgatggcgcatctattgggctgggacttcccagcatacaccattagggaagtgtagggttggctgggagagaacgagggagccaggggctctgggatagaggtggggagagaaggggaggtgagggtatcagcaagagggaagttgggctttcctttccagcagttgggctcccccatcctgcatcttcctccttgatttagaagaattcatctagagtgtcagtgcaaaaagccccttaccactccccctccctaacagataccctaaggctgtgcttgtgcttttcattcctgccattcatctgccaggaagctcatgcagttacagatgccccctagatctggccattcctgtctgaaaaacctgggaggttgtgcccattcctagtttccgctctttcatcttcccttgagccttcctgccttgactgatcccagctgcctctgagttccttcggcacatgtagaaagcatccctaccacataatttaccatctaattgcatgctgtcttgaatgagggctgtggtttcatgtgtggtgggtcttgggtacacaattaggctgtgagtaacagaggcctagagccccatcatgtctactagctcttgcacctctttgcttcccttccccccagcctacctactgcaggtgctaaggactgactgacctgatccggtgtttaggtgagcttcaggcaggctcccaggataaagcacaattcgcttacaggttctaaaaccagactgctcagtgcaggggttaggggggtgcccctgcccgacagcatttgcccaaatgccgctcctctccccagactcagggaggaggttctggggcagggccgaggtttggggtgatggcatagagcccaaccaggcagcacactgcagttgccatggtgacccttttgcttttcttcaggaggatggatttctcttttagcccaaatcatctgcctgggctactctgagaaccagattcctagccccctaccttccacattctaccacagggggcagcttgtcagaggctttggtttgaaatcacagtccagcatcagacagcaacaggttgtgcttgatcagggagcaggtgggaaaggcccagaggagggctcacctgggacgcatgccccgagggagctgacctccatctccttctgcttcccctcctctctccagaccacttctctccagtgaattgctctgacctttcaggtgggctcgggcctctctaggcctcagtgttctcatttgtaacagacacagccagggtctccgtgtttccacacctggctagtattagaattacccagggaggttttaatagattcctgggccccaccttaagcccgctgatctacgtaggtagaccccaagaatctgtatttttaaagccctccttgggtgatccagatgcaattaaaccaaagtgaatctggggttctcctggcgaggtgattagcaaggccctcgtgaaaagaaaggaagttctgcctgtgctaaggattgactggcctctccgggcttccaggagcttctggagagccccttacagcctagtcttgtcaggaagcgggtgtttcctggtcatgccggctaagccaagaccagacccccacttctctccctccagagaagccaggagagagagaatgacaggaaggggggatgttgccataacaacaagctccaagcagaggcctcccttccaggggctggtacttcaccccagtcctggtggtttccatggagatgggttactgagggacagggggaatgtctgccccacttagagcatcagccaggagctgccagaaggcagaacaccgctaggtgcgagcctttggacccctctgctctccgggtgcacatctgacaccttccccctgcttagttgctctctctgcgactggtctccttagcaacaagtcctgctaactccacgctgttggcttcatggctatttttagcttcactgccagcagcccagtcctggtcatttgcttgcaacctccatatggattgcaagggaataggaaaacaaagattcccagcctcttttggtagactgggacctcgtagcaacgattagaattcctgctatgaaatggatccattccccaacttggaacttgggcagtggatttgggataaggttcctgagacaacactgcattcagttcatttttaatcctctactatgggcaagatgctctagcccacactgcttccatacgaaggtgaatgaggtccagtccctgccctctaggaatatttaatcttgtaaaggagaaagatgagtacacaatcaccttcgcacaaggcaaagactggcaggtcctaacagaggcttacaaagtacaaggggagtgtggcagggatggggtagaagataagggacagaagggaaagataagggacagaagggaaagataagggacagaaggggaggataagggtgaggggccagggcagcactgtcaaaagaactttctgggatgatggcaatgttttaaaatcagtgccatcgaattcagtagcccccagccacatgtggctcttggacacttggaatgtagccagtgtgactgaggaactaaattttaatttgtatttaattcaaatagacacatgcagccagtaactgccatcctggacagtgcaaggctagaggaactttcatggtggaggtcactggcggactggtgtagaaggatatgcagggtttaggtggtgaaagttgaaggggaggaaccttccaggaagaaggaacagcatgaggaatagcaagtgggcgggcaaagcgtgggcttcatgatatcacacggaggcctccagattcgtgggggcctagaatgtcacgcagagtgttgactgattggcattgaggcttttgagctgtaggtgggaggaggacgggttcagaacagacatccatcctgacctctctttttgtctggatcaggtctccctggtcttggggttggtgggaatacgtgtggggtggaaatacgtgtgcagtgacttcatatgtgttgctttgcagatggctttatagggaccatggcttctctgattcagagtagagagactcgcatggtaaatgtcctggtgggatgacagcaacatcatctaccctcatcctgccggaactggattttatgacagagcatgccacagagcactgaactttgagtaaaacgtcaggcatgagctccgggcgttgctgctctttggagaggtatcatgatgggctagtgtctcgtctcaattctttgaggctggaaagtcacattaacatacttatgatcatgactcttcaatgacccaggagaatgatgcaccccagaatgttagatttaccaattgataacaggacatgtccttgccacacaaatcataatgcttgtcctgctgttttctggcaacttactggtatcagagtcattggaaaatgtaattaaaattggaagtttgcttgatgaatacaggatcagggcagagaggtgtccttcagaggtatttttgtcgggcttaggaggcctatgggatcactgttgtctgcccaccaaacaggaactgtgctctcattctcaggtcactctctccattggaccacactggatacttcctttccagcacctcttttaggctcttgacatccagcatattttcttctcatccaggagttcctcctttcaacatacttttataacaaatccaagaacatggcttattttacatggtgctgctatttgagtttggctatctttaactcaaacaaaagacctatctggtaaactaccagggaggtttactttggaagctcaagagcatgtgtgacctgaggatccttgaagattgccccattttagtaaggggatttttccttttactaaaatcacccctgctctagatcttggggtctcttctgctttggggtctgactgtgcattgaccacaaagaagacacatctctgtttaagcgactcagtctagaaaaggcagtgtttcctgtctgcatagttacaggagagggaagaaagatgctctgggttgttaaggggacacctttgagcctaggcttccttttgcttgttgggaagttgtgtggaagaggtaggatttgactttaatgttaaaggatgagaataaggaagtttgacggccggagggaacagctacctaatatgtggccaagagaaagtgaacagttctggccagttctgacaccttgagtccttgctgcacgcacggcatcattgcagtcttatgtcccaagaccacagaatgtggagtctaaggtgtttagccgcattataatggaagagcgggtatcgtacatgagacagtgtctgcaaaaggccaccaagccagaaccagaaacttcttttgagaggaggcctgaagtaagttctcaggcccgttgaccggcatggatgcagaagaggtatcagtgagagaagcagcgaagcaagtcatgctgcattccctaaaggttgggagcaggcaagagggacaaattctgggcttctcacttctgcttggggagcccctggaaatgtgtaccaggcaaataccttagttgggttgaaagatgggttggaacagaagagggcctgtgtttttgtttgtttgcttgtttttcgaatagcttcttttcctagctgtatggattctgggtctcagggttgggggggagtctgtacccaagtcttctaggtagaaggctctctggtttggggtccttgctcttcagggtttgcttgctctgatggccctcagggggagggggggctccctcactgcacatctcgtgacttcattataccagcacctgtatgtcccaggtgactgtggctgggagccaggcacctagagaattgtctcattgtcattaggagatggtggcgttccatggccaaagagggctgatgtcatcactcgttttgcagatgagacaacagatttcttgggggttaagtgacttgtttaaggtcatggtggtggaaacagaactgaagtccagatcttttttttttttttttttgagacggagtctcgctctgttgcccaggctggagtgcagtggcatgatctcggctcactgcaacatccgcctcctaagttgaagcgattctcttgcctcagcctcccaagtagctgggattactggcgcacgccaccacgcctggctaatttttgtatttttagtagagacaaggtttcaccatgttagtcaggccggtctcaaactcctgacctcatgatccgcctgcctcagccttccaaagtgctgggattataggcgtgagccaccgcgctcggccaagtccagatcttctaacaagtgccgctgcccaaatagccctctgctgtggggtgcattttcctccatttcctcagttcttccttctaattcatcttgccaacggcaactaggctgatttttccaaaatactcattcatcttgtcagaaaacctgcggttattcttccctgctacagaatatacccaaggacgcacctgaaggcttgccattaccttgccctgtcgtgtactgggagggtggaggtgggcgagggtctcctccctccccagcccggcagctcttgctcatcctacccatctcacctcattccaagtccgatccagcctccaggcccagtcggctcacctggaactgacctctgacctcttttgtcatccatgccgcccatttttttctacttggtatttgtggcatagttacctttacatatgtttgttttacagtgatcctttcatatttctccaagtctagtggaatcttcaacccctcgagggcagagccaacagggtctatttctttatctgatcctacagccaacgtaatggagggctgtgggtggggactgcgtctgccttgggggtaggtgcctttgttcaggaggaggaagcttgaaatggcggaggctgcacctggaggccgcacctggaggccccaggagaggagtcaggtcttctcgatctgcagatgtttgagcctgggaatgaaggaattgctgaactttctgaaggagcgccctcgccgcgaccaaccttgcaaacaggaaaatgagaaatccagggaaggcccagagtgacgcaggggccctgggactcgaagcctgacctcctcacgccgcgctttttgaggcccccccgcttctctattcacctgtagtgtggaggcgggagaccccccaaacaatccccgatctggagcgctcccaatgcctgcgcgcgcctgctgtcactctccgtctgtgtgctgagttttcctacagcttcctgggcctcctatctgtaagctttttctttttttttttttggttgtgcttcagagaaactcacttttcacaactttctcccggctctcccaggccgtccgaaagctccggcttgctttcgcccggacccccggctccctccgggcaggcggctcgggagcagccccttccctcccctcccggccccccggccccgcgctaatctcttccagagctgggggaggggccaggcggtcttcccgaaggcggggcgctccctgcagcccggcctgggcgggccctgggaacgggcggggaacggcctcgccccccggccccgcgcccctcggaccggagaagaggggctggcccagcgccagcgtcggagcgccggccccctccccgggccgctcgcagccaaccaggccctccagcggggcccacgtgacctggagtcctagacaaagaaaatgttccctccctcccccccgccgcccccctcccctcccagtggccccctccgcccccagccccatcgcccccttcccctcccccaagacgggcagctacttccagagcttcagggccgcggctcacacctgagcgcgactgcagaggggctgcacctggccttatgggtaggttcctggacggagccccggggagaccgggggcggggaggcggcagggccggtgggaggatctccgcagccctccgggtttgaaaagagtgaagtatgcctccccggcccgcagcagccgcggcgtcccggcctggcccgagttctggagatgctgacttagtgctggcccgccgccttcctgcccacgagccccaaggccccactcctcgagggctccagtggcacctggcgccctcgggggacaggaagagcagccggccgggagcccgggcagtggtaactgcaggctggggcacgcggagctggtggcccaggagttgggttggaggcagcttcagctgagctggcagatgggtgcctggcacttccctggtgacctgcgtttctggctgggggaccacgcggtcctcagggccctgccagcttgcggcctcttaagagggacagcttcctctcctgcgagttcctggaagcctccaggcaggccgccagaaagaagtggtggggggcgggagagcacggtgcgaccctgacagggggccggcctgtgacaccagggtagcccaaggccgcatgggcttgggggcggtggcgctcagacctctgacctttggaatgggaagcgctgcagtcgcagggggaggtggaggcgggacaactgcctgaggagatgggactggaccggaggcagtagtcaccggagttcccggtggctttcccagtctggacggactccaggcccaggggcttccgtgagccagcagggagtggggaatagtgtggtgtctcttgaatgccgcctggtttctccgcccccctgggggtgagcagcccgcagcccaaatgcgagagcctcgagttcacccctgtttctcttattgtttgcctggggaggaaggcaggagtgcagagggaaaggggtgctttccctacgccccagacaggcctagtctagtgaggcccctcccccacccagctccggctgccccttcccctttcgtcaggccccctgctgctcacccacccccccccccgcttcttccttcccccaccccactgccccagtcctgatggaggccccttcctcctccgccagcccttaccgggccgggtgcgtgttctgcaccaagtgggctggggatgctgaacagctcgcagcgcggcatctgacaagctgggggaagttgtgggggaagaagaatgttcaggaactcgctgtgaaggggctgagagacaaaggggccgtgggggagtgctgagggtggtgtcaggcacgactcctagacctggggagccagaggaggagcccagcccacctgctgctgccgctgccaggaactgatagcgggtcctttccccttcccgcccactgctacctgcacacctcgtactggctcaggggcctcgccacgcctggaaacggggtctttggatcatccgaggcatcaccctaggtcagccacccatgcctgaagcttgagaaggcgtggtgggcgaggagcagcggcgtggtgtgggctcctctgcgagggtagctgacgcagctgaggatcccagcaagggaggcaccctcccccatagcggggtccacacttcagtgcaccttctcgtaggggaggaggcgatggctaattgatagtaggaaggggagggcagagttctggccaggtgagagtggggctagggagcgatgagcaattactccacattcttccacccccgcagtccgatccgtgagctcattccgccatccatgagctcattttcccagctgtttgggggttgggggcaaaggatgcattatcctgttttagaatttgttgagtcagaggaagaactaggacttaacatcttcagtgtttttcggaatcgccataagaaacagattggtctgtggcttggaggcaaagacttgaagactcagtgaaattaaatgaatctgtaagacaatacattggaccactgagcttcaaacaaaggttcttaacctgggacccttggatctggggggtccattgacaggctttgggagagtcctgggaatcattggtccatatatacaccagatttttaaacaggtcagaaaagctttccagaaatccttccgttcaggtgcctttttatgttggagcaactcctagaaaggactgctccaaagtcagctgctggttgtgaggctccgacaggaatgtagaggctgcaacttcagattagagctcttcttcatactccaggttgcttgctcatcctctttacccttgaggatgggtttgcattcgcagctctaggcccatgggggagctcttttgaaaggcatgtagaaaatggggttttctcccctctaaatctggtatggtggaaatgggtgcaaagccttgaagtcagagggccgtgtttcctagattcagtaaaaggctaatggttctcagagctaagtatcaaggatttcattctcctttgtagggatcctggagcgggttgtgagaaggaatgggcgcgtggatcgtagcctgaaagacgagtgtgatacggtgaaaggatggaggctgtgcaatgggagaataactggggtttggcttattaatttgttggtgggatggcagagagcacgcctggtctatagtgcctgctcagtaaataactgaatgaatacatgtatttatggatctgaagggtgcacatagaaggggtcgaatctggtaacaatacacactgggtgtgatccataagaactccagcatggcgtctgagcatgggaacagacaggctcttggggagcttcctatggtgtttgagcatgtgctggggggagatgggctctttaaacccagagcagtgatttcttcgtcagcagacatcacaaaactagaattgtggcctggaaaccaggaataggaaggattgattgcccaggggaattgtggagaagaagagagggtcccccttgctttttaaatttttggtgacagggtcttgctatgttgcccaggctggtcttgaactcctgggctcaagtgatcctccctgctcagtaactgggattacaggcacatgcctggctgaagatcctagtcttgattaagaagataggagagggtggaaccaatatctgtgtctaaacaatagtgcctgattaatatttggatagaattaacatctccataggtagggggagggatagcattaggagatatacggtataatgctaaatgacaagttaatgggtgcagcacaccaacatggcacatgaatacatatgtaacaaacctgcacgttgtgcacatgtaccctaaaacttaaagtataataataataaaattaaaaaaaaaacattaacgtaggctagacacagtggctcatgcctgtaatcccagcactttgggaggctgaggcgggcaaatcacctgaggtcaggagttagagaccagcctggtcaatatggcgaaaccccatctctactaaaaatacaaaaattagccaggtgtggtggtacatgcctgtaatcccagctactcgggaggctgagacaggcgaatcgcttgaacctgggaggtggaggttgcagtgagccgagattgcgccactgcactccagcctgggtgaaagagtgactctgtctccaaaaaaaaaaataaataaataacatttccgtatcatagggtaggcaaccgatatgctgatgagattgaggaagattagatctgggaggaaggtttcctaaaaggcagaaaagaaggctggaattgtgtgacttgagttcacctctctacttcaagtctttccatttttcacggcaaggcagctggttggctctctccagcccttgaccttctgtcactgttccgggttttgacaaacatggtccccttgagtgtcaggtggccttgctaattcctggagaggtcaaggtgactttttgttttttgtttccccaggctgagaagaaagccaaggtcattgcaggaatgaatgctgtggaagaaaaccaggggcccggggagtctcagaaggtggaggaggccagccctcctgctgtgcagcagcccactgaccccgcatcccccactgtggctaccacgcctgagcccgtggggtccgatgctggggacaagaatgccaccaaagcaggcgatgacgagccagagtacgaggtgagcggcttcttcaccagccgtggccagctctttccgggggccttccactgccagctcctcccgtcctgctctcctctctccatctcccacgggccgctcgctctctccacctgaccccgggcctcttcgtctccccgattttgctctgtcttgcctcattcagatggagctccctcctggctgtcctgccccccagatgcccagggctggggttgccatggggggatcagggtggcagggcctcgtgaccactgtgtaatgatttctgctccttggggctccaggacggccggggctttggcattggggagctggtgtgggggaaactgcggggcttctcctggtggccaggccgcattgtgtcttggtggatgacgggccggagccgagcagctgaaggcacccgctgggtcatgtggttcggagacggcaaattctcagtggtaagttgtggggtttggcagtagcctggggtgggggaaggttcttgatcccagggcctgtggttttggctgggggcagtctggaattggggtgatggaagtgggttctgctcacccctactctgcctgtggtgggtggaagaagctgtagggataattaggttgcacctgtggctcagagagctaggatgctggcccagttttagccttccaggaacctattcactagaattcctttccacctgcactcaggtacttccctactcttggtctggactcctctttgcatcgggtaattatttatcactgtatctggtcccctccagggctgagactgactctcgaggctcccagcccctgccagttgcaaggcatggggtgggtgcttgcaagtgtaagcctcggcaaacaaggcctggcttgtccccccaggtgtgtgttgagaagctgatgccgctgagctcgttttgcagtgcgttccaccaggccacgtacaacaagcagcccatgtaccgcaaagccatctacgaggtcctgcaggtgagtgtccctgctgggagctcggaggaggagcctagagcactaggaggcctggaagttggagtgcaggtcgggcttgagcagaacggaggcccaggaggcagcgactcctttctctccacctcgctcgcccgtatgcacatcccgctcctcctcagcggttcctccccatcttgcctgtgccaccctcactactcagagtctggccttgagcctgacccatctgccttccagcctgtcctgacaaccccaaccctggcgtgtcaccctccaggtggccagcagccgcgcggggaagctgttcccggtgtgccacgacagcgatgagagtgacactgccaaggccgtggaggtgcagaacaagcccatgattgaatgggccctggggggcttccagccttctggccctaagggcctggagccaccagaaggtaaatgagggcacccagctttctgggacccctgcccgccaggcagatccacaccagggctgggaaagccatgcttagggagggctgccaaggcctccacagaggggcccagtgggaacagccggggtctctcttgccctggggtcaggacttgaatgacctgctctctgttggttggctagaaccgtagagttgggaggtgggaacaagttggagaccaggccgcaccccactgtaaggagggtgggggaaggggctggagtttcctgtcagcctgtaactgaccttggcacctgctttcctcctccagaagagaagaatccctacaaagaagtgtacacggacatgtgggtggaacctgaggcagctgcctacgcaccacctccaccagccaaaaagccccggaagagcacagcggagaagcccaaggtcaaggagattattgatgagcgcacaagaggtagttggcctgcttctggagagggtggcaccaggaggcctgcatccgaggagcaggcgcggcctcctctgacgccagctctcctccccttgcagagcggctggtgtacgaggtgcggcagaagtgccggaacattgagggtaagtttgttgcctgggaactctggcactcctagtgtggcatggggcagagtagcagaggcacttaggaaggtttgaatgacatgggaccaggggccacgtcctgcgtgtcacaccaccttcaccgtgcttcgtgcactgtctgtctttctggtgccatgattctgctctcctgtcaatggcgtgggctggtcttcagggtgtgggactccccagtggccacagaagggcagcccctcttgggtgtgactgaactcacctacaggtcccctttcagcctttcacctttgctcacctctctcatcctggggctgtcgccctcagcctggtgctggtggatctggctcaggaccctcggcctgggaggattggggcaggggtcaggacttgaggattaccccgggaatccctcctgagtaacctggaaccagggctgcttctcatgagcaggtttctgtcctgctgtcactccatccctgtttgtggatggtggcattggtgctctgagatgatggcgttcgagactggggtcacagtgcctcccttttccgtggggcaccctggactcttttctggctgccgctctggcacaccccttttttgtggctggtctggtgctgggctccggcccggggagggagaggcccttcggtggtactcaccccatcccctccctctgctttccagacatctgcatctcctgtgggagcctcaatgttaccctggaacaccccctcttcgttggaggaatgtgccaaaactgcaaggtaggagcacacccacccaggagaggtgccgttgaggccggcccttcggccttctggctgactgtgtccaccgcttctgggcatgtacagggtgacacccggtgtgcgtgtgatgtagacttcagagcttcctctggaagcagagtcctgatgacacgggcccttgggtttcaagcttttgacttgctctcatttttctcctctgaaagattctttacctctctcaagccccattttagtccccagatgtggggatgggagcagagcagcggggacaagctcaggcagagtgtagcagggttgccgtgccctggggagcccaggagaaaaacccagggctgcaggaaggcccaaggtggtggtgcagccccctccctggccttgttctcaggctgctctttggttctgtccatggcggtgcacaggcagatgaggtttccccttcccagatctgcagctggggcctgaccctggctaaggtggtggcggggtcatgtcttcagggcttaggctctgtgaggccaggtgtggagcctcccttcgtcctggccgtcctgggacccgtcctggtggtttctgacccttcccgctgctgtctagaactgctttctggagtgtgcgtaccagtacgacgacgacggctaccagtcctactgcaccatctgctgtgggggccgtgaggtgctcatgtgcggaaacaacaactgctgcaggtgaggctgttgtggcctccagtggtctccttagctgggccccaggctcccgccgcccaccgcctcccctcctctcccttccccacagaccctccaccccctagccatgctccagacccggtctttccattccaggtagcacaccttggcctccccggaccagggctgagagtctcctctgctcactgggtctccttccaggtgcttttgcgtggagtgtgtggacctcttggtggggccgggggctgcccaggcagccattaaggaagacccctggaactgctacatgtgcgggcacaagggtacctacgggctgctgcggcggcgagaggactggccctcccggctccagatgttcttcgctaataaccacgaccaggaatttgtgagtgctgggcctggggcgcggtctcgagctcccttggctgagccttggttgtggggcctgagctgtgcgcagggtgtgtgggtctaggagcctggctggagggccagcgctgggtgggagcttgggacaccgctgggcctgcatctgacctgttgtgctcactgcttaggaccctccaaaggtttacccacctgtcccagctgagaagaggaagcccatccgggtgctgtctctctttgatggaatcgctacaggtgaggggtgcaggcccaagaggtgctggccgccttgtcccaggatgggggagccaggtgtgtgggcaactctggcaaaacgaaatgatggttagcttcacagctgttaaaatattatcccaaaggggaagcttgtgtgtgaagtggaaacgtatgcagtccgtggacttagatttgaccaaaaataaaaaagtaaaacaggtggtaaagcagcctgcctgctgggcgcttccttagtaaggaagattcagccacagaggccgagtgatcattagtcagattcacagagatttcacagagcctcaaaggacagattcagcaagacagaaacatacacagttctgttgtgttttgattatacacaagatagtctaaagaagacttatttaaatcacccattatccttttattaatattttggcatatgtccttttcagatttttttctgtgcgtttgtgtttatataaccatacatccatagatagataaattaagtgggtagtgaatgcacacggttttgtaacttgccttgcatttattatattatgattgctttttcatgtcaagcgatataaagctacatttttttttttttttttgagacggagtctgttgcccaggctggagtgcagtggtgccatcttggcccactgcaacctctgcctcctgggttcaagcagttctcctgcctcagcctcccgagtagctgggactgcaggcacccaccaccacgcccagctaatttttgtgtttttagtagagacggtgtttcaccgtgttggccaggctggtctcgatctcttgaccttgtgatccgcccacctcggcctcccaaagtgctgggattacaggcatgagccaccagacccggccaaagctacattctttatttgtaagtgttgcgtaaggttccattgagtcaaagtgccgtaatttatttaacgaacccctattaggtcatttactattttttttattattattataagtagtgctgtgacaagcatcctgatagaatatatacttgaaccattccctccttaggaaaacctttaggagatgctgggtcaccctgcaggcattgtttgcttcatgtgactctggacactgcagaaagcgtcctaggagattgtgaagacacatccacccctctgccctgcccccccagccaagggcttcccggcttttaagaaaggaatagctcttcttagaattcatgtctttggccagagggagataggcagtctcaacccagggaccctggttagagggtgaggcggaggggatggcttccccggccagatgtttgtcttctgttctcagctccatgctgctcttctgtaaacctagagaagttcatttacagctttttgtatcccagactggaaccttgaggccttcttaaatcatgtcacaccccaggaggctgtaaaagctccttggctgggggacatgttgggagcagcagaaacagtgccgtaccctgtttctcccgagaccctctcgggatctgctctgattgtttccttgcctcagttcggctagcatttctggagggggagggatcgtggtaaggaaatctgtgtggttagctcgggggaagcacaatgaaggaggcctcctctgtctggaagagcctttgcaatccacgagagggctgagtgaggaatggaaactgctctgatggggaggcaagggatgcacagagctggggactcatagcggagggggcggtgattccaggggctactgggtggggcagggcatttatgaaacctttgtggagcagggaacattcaggttgagtcaaagggtggggtagaattgtagcaggaggtgataagagggtatggaaggaccaagttgtagacggacaacaacaaagaaaaggcccccaaaaagtcagctgtgattcttcctggatcctggaaccatgtactctccggtcagttttctgcagctttgactgccttccagataggccaaacgaggcatgagacagagcctcgatgtccttactatggatactccagttggatccagaaaggatttaaggcatcttcagggaaaagataggacttgggcctacagctgaccccatgggtcctgttggccagcaggctcacctgccgagaccagggtgccagggagatggctccaagtaacggtgctgtctgctggctggtgcagggctcctggtgctgaaggacttgggcattcaggtggaccgctacattgcctcggaggtgtgtgaggactccatcacggtgggcatggtgcggcaccaggggaagatcatgtacgtcggggacgtccgcagcgtcacacagaagcatgtatgtccatgctgtggggcgcagcccgtcttcccctccctgcacactcagcacctggaggcagcccttgcctcctttcattttgttcatttgccctctttctcttcaccctttgccccagcctctttttctccttatcttccatttgtcctctgtcttgagagggtaaagggcaaattgaaatgggaatttgggctaggcatggtggctcatgcctataatgccagcactttgggaggccaaggtaggagaatcccttgaggccaggggtttaagactagcttgggcaacatagtgcctacttgagctctggctactccctgggctggtttctggacagtttctagtagagctctttggattagagagaggttcctgtcctcccaatacttttggcaaatagctttatcagcttccatatctgggaggctcaggcagggtcttcccttaagcatgactacaggccctctggagtcctgaagggcaactggaggacattcacatggcccagacaccctgcctaagacactcagcatgccaggtaccttcagactcagccgtccacttgggtcaccttcccagtgggtggctgtgttgcctgcctgggtgatactagtttccccattggcctaagaaatgatccaacttggtcccgttcttgtttaggacttgtccatggttgcagctagggtcgtgagcctgcagagcagctgggtctcctctctttcgtgtcaaaggacttctttgccaagttcacagataatttctctttcttcctgtctgcctctgtccctggacagcaggcccatcacgttgcctttatcctcccagatccaggagtggggcccattcgatctggtgattgggggcagtccctgcaatgacctctccatcgtcaaccctgctcgcaagggcctctacggtaggtaccatcctgtcccctccaccttctcagctggtgcttccgcacataggcttcctccttggatatttctgccctgggacagctattcccgatgaccctgtcttcccgtgccctccccgtgcccgagccacaccactgtcctatgcagacagccccagctgatggctttctcttccgacctctcagagggcactggccggctcttctttgagttctaccgcctcctgcatgatgcgcggcccaaggagggagatgatcgccccttcttctggctctttgagaatgtggtggccatgggcgttagtgacaagagggacatctcgcgatttctcgaggtatagccagcaaccttggtttggccagctcactaatggcttctaccttggactgctgcttcatcctgtctcatctgcattgtggagctggggactggtgacttctgctttgcaaggggcctgtttgggaagccccaggcttcctggatagaaagggaggaagcagggttagaggcctacctcggaaagaaccagtggtctcactctaagaggtggcattgtgggtgtggacctccggggttgaaggacctgtcactcaatcaggtggggtgccagactcctggggttgggtattctgtatggtgtttgttacacaccaggatctttgagaggacaaaatcagttttccctgagcaagaagggcctatcctcactccctggtaccatgacaggcacctgagaagaaaacaagacttagctcagttttcattccttatcatgtgagtccccgtttaaccctgagccaagtctgagccgcgtgcagagggcttctgctgccagaggcgtgcttggagtggcccttctgggagcttgagcccacctgtgctcctgagtcttggggtgggtcacactgtgagctggtgttctgactgtaagtgtgagcaggcgtctgtttgagttctaatcagggctcatggtaaacacacccatactcgctggagcctgggctctcccagcctctgggtagtctagagcagcactgtgcaatatggtagccaccagccacatgcggctgtttacattaacattaaccattcagctcctcaatcacattggcctcattttaggtacaaaatagccacctgtactagtgggctagtggccactgaattgaacagtgtagaggacaacccaccatcgcagaagttcatttggacaatgctgatctagaacgttccagtgacagcttgtggaatgtggctaggtgtaattccagcttctcctggaggctgcaggctagcccagtgtgtggctcctgagagagaagtaagaggctttgaggctttaaggctcgaccccagcagcatgccggcgctgtttcatgctcctccttggctcatcttcaaaccgtctcctgttttgtagtccaaccctgtgatgattgatgccaaagaagtgtcagctgcacacagggcccgctacttctggggtaaccttcccggtatgaacaggttggtgaaagctcctgggcctggggggctgtgggctgggactgcaggtgggatgacccatagtggggaagcccctgagccgggccctctctggccggcctctgctgaatgactagctgctctgccatgttccttatttccttttccttgaggaggaagaggagtcagggtatagaaaatactcgtctgaaaccaacaactagtggtcttaaagcaggacctttaaaagtactctctttataccaaagaagagtcctgtgctgctgagttaggtagttggttttctgacattggtgatgtgtcccgagccctctggttcttagattctcctgaggcaaagccatggggcatggctttggggctgggaaggggagttgtggccacagcctgttccaggagagggaatcttgcagcggctgcatgcaagttcagggttctgcttaacttaattttactaatcacacactttgttggcttcaggtccttttttggagagattttcttcagttaggttacacagataaagattttaatatctaggaatgaagaaaattcatttcatcagttataaaactggcattataaaaaggctttttaggcgaaataaattgtccagagttggcaattcaaaagcatgctgagagccgctcagtccctgtccattgtggagggaagcgttttccagagtgttctgagtcatgggtgttaaacctccatggtgggctgcttggtatacttggtataactaggagacatcatttcacctggcctcggtcaaataatctccctccttgctattcccatgaggttgtaggaccttccccatctcatacatgtttggtagagttgctatcgagggcttgttgaggggaaggagatggggcattggggcagctggcctgaaactgtcccccgagagttcccaagatacatgtgcatattgggaaatggatgggctaatgaggtccagtattttcatggaaccactcagtgtctcccgacagaccttggtcctgtgggatttctcgcctgcttctttcaactctaaaatactaaactctgagcttctaggaggagcagaggtcctgcatgcagggccgactgggcagtgcacgcataaagagtcggggacatctgtcgagcacctgatttgactgcaggccccgtggttcccacactgagatcctggagccagtgctcagggaagccttccttaaatatccttacatgtcagaaaaggtcagcgttgaaggggacagccagtcagttatgtggcctgcaccctgagaagtgacatatttaatgtcacagaatttttggtctttagggaactgcagaatttaagtctggttttttttttttttggagacagagtcttgctctgtcgcccaggctggagtgcagtggtgccatcctggctcactgcagcctccgcctcccaggttcaagcgattctcctgcctcagcctcccgagtagctgggattacaggcacctgccaccacgtctggctaatttttatattagtagagaccgggtttcaccatgttgatcaggatggactcaaactcctgacctcaggtgacccgcctgcctcagccttccaaagggctgggattgcaggcatgagccactgcgcctggcccagaatttagtcttttaaagcagtacatttaaggcttgcggtttgattaatttcatccagtggacacacccgtgtaacaatcaccacaaatcaagatacagaacattgtcacccccaaagcttgcttcgcagtgggacgcttaaagctcagtgtattttagactaactgatgtaaagatagctgtgctttttttttctttttctgctaggtgttatctgcctgttcacaatttgagaccacttttgaatttacctttaaggattaacgcttggtggatttgtgtctttgcatggctgcagtgtgtgttcgtgtgtttgcggggagtttgaagagagttatgacgtgtgtgcgtgatttggggaaggggctcttaccctgtgaactagtggctgctgggggagggaggggagtcgtgcagctggggcccttcccgctgttatccaggtttctgttgttacagtctctcttctgcctcctaggccgttggcatccactgtgaatgataagctggagctgcaggagtgtctggagcatggcaggatagccaaggtcagctccagcgtctagaacctctgctggggggcagggagaaggaagggcaggatgaggtggagcggtggccagggccttgtcccgcctgcttctccagctagtgtggagaatgcaatttaggagacggtgcagggtcatgcagcagggcagccagaggagggcccagggctgctggccttcagcccttcctccctggtgagtgtcgcccatcacccccggtagacactgaggagtctttaccaagacctggttgtgctgtggcttttttttcatttttaaattttttggccaaaacctattacaaaagccctcaaagcagcctcctgtgatgtggaagctccatttctctctggagctggaatctcccggagtgactacctggggcactgggttctgtgtcagcaggttccagcattcagaaccactggcagctccgagggcatctttgagcccctcagtaacttggcatcctttagcctacaagttactccatctctgaaagaactaattctttggaagacttggaaagtacagtggctacagcttctacttctaaagtctgtggctaggccgggtgcggtggctcacgcctataatcccaatactttgggaggccgaggcaggcggatcacctgaggtcaggagtttgagaccagcctggccgacacggtgaaaccctgtctgactaaaaatataaaaattagccaggcatggtggcgggcgcctgtagtcccagctactcaggagtctgaggcattagaatcgcttgaacccgggaggtggaggttacagtgagctgagatcgcaccactgcagtccagcctgggtgacagagcgagactccgtctcaaaaaaaaaaaaaaaagtctgtggctagatggatctaagattggccaggtgacctccaagtaggaagaaaagtgaggctgtggggtctgtggaggctcctgccctgcgaactctgctcactcagagccatacccagccccctgggtggaccaggccctgtcagggtttggcgagtacctggcatatttggtagacgcatgaccagtgttggctggtgaatgaattcgtgcttattcctcttttctcctcttcatctagttcagcaaagtgaggaccattactacgaggtcaaactccataaagcagggcaaagaccagcattttcctgtcttcatgaatgagaaagaggacatcttatggtgcactgaaatggaaaggtacccgggttgtgctggcatctggctgcggtgtggctgttctgattgctgtgcttgctgcgggggtcctctgcctttcccacctgacttgttttccacaaacgtcctgggaacagtgggttttatcaagcatttcccaacatggcagactcctggggtggactcctgacaccccaggctcctgggtattttaaggctggtcccaagtaagaggagtctaggggccaggagcagtggctcatgcctataatcccagcactttgggaggccgaggcgggtggatcacctgaggtcaggagttcgagaccagcctggccaacatggcgaaaccccgtctctactaaaaatacaaaaattagctgggtgtggtggcgggtgcctgtagtcccagctactcaggaggctgagacaggagaatcgcttgaacctgggaggtggaggttgcagtgagccgagattgcgccactgtgctccagcctgtgcaacagagagattccatctcaaagggaaaaaaaaaaaaaagaggagtctaggaaatcccctgctgccttgtctcccagagaccctgctgatcccccagggaaccactgcagtgacaggaccttaacttgtggtgccaattttataggtcttttgtaaaccaagccagcatagggccaggcagacctcgcagcctcaacaccctgatttgatgcaaatgggactttcggggctggatgaccttcttgttctctgagtgtaactaggatttagccagacaaagagaccatttacacaaacaaccagagcaaacaggaaatccttcagcttctgaagtcaggcaggagttcggctcctttttcgccttccctgctcttgatggggaggatgctagggctacgtgttcgttacatgcagactccaggtgtacgttgccgagctaaccctgcaggagaggagaactagagagtgtgtcctggaggtatttctgagggattgttcaaaattactcttatttctgctgggttgtgaaactctaggcagtgatgaccttactacctttaaggtcacagaaaccagcacagtgcctggcacatggttggtgatctgagtgccgggttgtttataaaggacagaagattcggcagaactaagcaggcgtcagaggagttggtgggtgtgagtgcccctgtccctgcacttcgggtggctgctggtcctccgggtcctgctgtgtggttagacggcttccgggcagcctggtctggccagcactcaccctgccctctctgccttttctcccccagggtatttggtttcccagtccactatactgacgtctccaacatgagccgcttggcgaggcagagactgctgggccggtcatggagcgtgccagtcatccgccacctcttcgctccgctgaaggagtattttgcgtgtgtgtaagggacatgggggcaaactgaggtagcgacacaaagttaaacaaacaaacaaaaaacacaaaacataataaaacaccaagaacatgaggatggagagaagtatcagcacccagaagagaaaaaggaatttaaaacaaaaaccacagaggcggaaataccggagggctttgccttgcgaaaagggttggacatcatctcctgatttttcaatgttattcttcagtcctatttaaaaacaaaaccaagctcccttcccttcctcccccttcccttttttttcggtcagaccttttattttctactcttttcagaggggttttctgtttgtttgggttttgtttcttgctgtgactgaaacaagaaggttattgcagcaaaaatcagtaacaaaaaatagtaacaataccttgcagaggaaaggtgggagagaggaaaaaaggaaattctatagaaatctatatattgggttgtttttttttttgttttttgttttttttttttgggtttttttttttactatatatcttttttttgttgtctctagcctgatcagataggagcacaagcaggggacggaaagagagagacactcaggcggcagcattccctcccagccactgagctgtcgtgccagcaccattcctggtcacgcaaaacagaacccagttagcagcagggagacgagaacaccacacaagacatttttctacagtatttcaggtgcctaccacacaggaaaccttgaagaaaatcagtttctagaagccgctgttacctcttgtttacagtttatatatatatgatagatatgagatatatatataaaaggtactgttaactactgtacaacccgacttcataatggtgctttcaaacagcgagatgagtaaaaacatcagcttccacgttgccttctgcgcaaagggtttcaccaaggatggagaaagggagacagcttgcagatggcgcgttctcacggtgggctcttccccttggtttgtaacgaagtgaaggaggagaacttgggagccaggttctccctgccaaaaagggggctagatgaggtggtcgggcccgtggacagctgagagtgggattcatccagactcatgcaataaccctttgattgttttctaaaaggagactccctcggcaagatggcagagggtacggagtcttcaggcccagtttctcactttagccaattcgagggctccttgtggtgggatcagaactaatccagagtgtgggaaagtgacagtcaaaaccccacctggagcaaataaaaaaacatacaaaacgtactggtgctttcctgtctaagtcgccttttgtgtgttcttttatgaggcccccaccatccacccctctgtgcacaaggcggctcccggcccctggaatgtgatgtttttggtcatctccaaaggctgcagttttatactgggaggctgatgacaccttttattataattattcttatggttctggttataattatgtttgttttaagattttctttaagaaaacaaaaacccaacacccttccctttaggtttcaaaccaaggtgcgggagcagggtgcttctgagttagcggtggctctggtgccctggctcccacccctcgggccaggtgggccactgggcatggtgacagctgggcggccagggagtccccaaggtctgccttctgggcttgtcactcttctcttctacttcccctcctcttgagtcgggtgtgtcagggctggagggaggaccggccgtctctctccttgtgtgtgtgattggagtggtgtgtatttcttttctagtacttggtctgatgatagctgtgctcttacctcgagtcagcagcacctggagccccaagtgctcaacactttgttctacttcctacaaggcaggcggcctggcgtcagtagtaggaagggatggcattgttggctccagggtgagggcccgacgggcaggtgcttgcctgggtagatggggtgtagatatgtggcatatagagatatatattttataatgggaggggggatggcacctcctgggactggtagagctgggaggtgtgtcggcaagcacatggccccaagtccacgtccctagaaagatggggcctacagtgataggcgctctataaatacatagatagggtcatgtttaagaaatattatggggtggggagtgggggaagcaggcttagtgtgctgagcctcggtccccactgcagacctaaaccccacaccaatcagtcaatctcacacgcatacacaggagcatatttctgtactgatgcataatgaatgcactcacacacacacacacacgccagggggctcccagcactcttctcccagggttcaggactttgtggagtcagcccgtgcagctatttacctctgttgccctgattgcaggtagactgtcaatcccagaagttgctaggtgctgaggcaggaaaaggaggaggtttcttttagcaggtgctctcctctagcaggtagtgttctatctcttttgcccctggtgatgtcaaaagattcttctgttagcaacctgtgatactgacctgcaactctaggcaccagtcaagtcagccctcaactccccctacctattctccccaactgaaatcaaattgacatccaggtctgtcttggccagggggcttccattggggaaaaaaaatgggacagtgaacctcacctattgaataaaccaaattagtaattagtgacaaaaccaaaccaaggctttggaccccctgctcattactcaggagtaaattcacacagctggtggccggtctcacccctttttggggtgcttggtcctggaccccaatctactgtctcctcgacagattggtgtttaagatcatgcccagttgcttcctgtcacctcttgacaggtggtgactgggctgctgtggggctggagcagcgaggaagggagcctctgccccctcagtggagtccctgtgctaactgtggtgctcacccagctcctccttgctcccgcggggctctgtccttcgggcctggagtccaccagcgccactccaggagggctgggggaggaggggctgcctcaggcagtccaaggtgctccctcccccgctggccaatgctaaggtcttcccggctcccagggtcaggacagagtcttctaaggctcaggctctcccaagccactgcttagtgacagttagcctttcccagcggcccaagctccaccggaactgggcctggtgctccaaccaaagggttggtgttgggacttgggaagagacttggtagccaagggcatggcaagcctgggggattcctgtgggccggcttgctcgaggagggagtgctgggcacagaggagcccttatggctgacagcttgagagcacttgttcctccagatctagccacttgaccaggccctagaatggaccagatgccccaggggtcatggcccccccccccccccccttgcagggacgagagttaacaatcaccagcttttcttccggcccagcctgtgtgcttggtctcacagtagaatttaggagagtgtggggctttgggattgtgccaacttggccaagctgagatatgcttaatccacctcaacgctggggcctctggggacaggtattgggtcaccttccaaggggtgctgaacttcagcaggctgtagataaggcagaggttagaggcagtggagtgggggaaccaagaaggcctagggaaaattgccaggcatattccctgtggaattttctttccgaagagtaggcccatttcccccttagaaacaagggttctgggggctgatgacagcttcccctgcaggtgccaggtggcgcatgatgccaaagagatccgtggctcttgcctgggggaggtagccaggtgctcgtgctggggacacagtccttggcctcctgcctaagcaggaagctagtttccagcaggcggctggtactaaccccccgccccacgggagcgacaggctggtgcaccggcagactggggggccgcaggcgggcactagcaggggtctgcagtccatagatgatgacatgaatctgttgctgtccttttgtctctaggccccagagacttcttgctattgaacatcctattggaaagcaaactttccaagagagcacccgggacctgttagcttttgaaacaggcctgggtgtgattgactggtagagatgcctgtgtgatttttggcgcattgcaggagtgtggattgggacaggcaccccagcaggaaggaaggctgacaccaaaggggtctcacagggcccagctccccttgcttcccgataattggccaccaggccatggcgactctggggaagcctagatgggaacacccaccttctccagcagtagaaggaatatttcagcagagccatctgggagatgttcttataggaaaactgcagtcattcatttcatagttttgcttatataaatagagtacatttgggaggcagttttgaattcctgttgctactctgcttggtgcggagttgcagtggccccaagtgtctttcagagctgttgcttttaggatccccctcaagctgtgggttagggccagggcagggagggggtgctgcctggcactgtgccctgaagagggctgcttgcttcctttggtcgggagcacggcagagccaacattctggtgggaaccgagtttctagccaggcccctgttttggtcccgggaggtgagtaatctgagtttgtcattgcgtattctccacgctgcctgctctcagtgctggagactagagagcgaccctggagttgtcctctgggagtcctgcctgtttgccagggagcagctgaaacctccccgctcccaatcccgggggtggaaaaggtgtagtggaggaatggtctggagctgggatggcccttctggccatgccctgctgagccaggattaaggaaagtgtcagccgcctccttaccaggccctgtgctggggtcaggaggaccgggaggagagggaaggggtgagaggatggactctgctgttgtagtgtgagctctggaatctttacgttttggtaaaggcaggccagggtctttgaggatcgagttggggaaccttgcctctgtgtttccgagacccagctaaggtgggcctttggtgggtgacctgtctctgacccgaggcagcagagttttgggggagggagaaacaagcaaggagcagggaggacaaggacacaagatccctttgctggtggtgacttactcacttcccccaccagagggcctgggactcccgaaactcccgtaactggaaagctccctggctcagctccactggggggtgaggagggcggctccctcagccccagcctagcggcctccaaccctgtgcctgagaacatgagcagcggtctaaagcatcccctagtcccatttcacttcacagaccgatttggttgcacagccctagaattcaacagacaacaaaaatgctgaaattccttagaatacgcagagggaggaggtgactcaccaaggtgctaaaacattttattaaaaatatatattgttaaattaagtctgctgtctggacaatgactgtttgttttgttttcttgtagtggagtttaaaagagactattattttactctgatatattattattaaaaaggcattttaactttgtacttgaaaactaaatgagcgatttcatgtgttttagctgaggcattgaagtagcgggtgcttacttatttgtgggaaatcatgtattcatactgaagaataaactccgtagctgatttggtaataacttttactgttacagacgatttcgctttgaccccggtggcagagcacttttactccacattccacgcagctaaatgcaggacttcccagactcttccctccccagccctctttcctttctcttaagttcctcttttctcctttattattattatttttttttcctggttccagcatcctttcaccactgtattttttttttttttttttttttttttttttttttttttttttttttttttttagggttgcttctctatttattgacaataataatgtacatttcacagtctggttctaggacattcagggaagggcgagtgggggcccgaggggtccctgccccacccgcctggtgtcctgttgtatctctgtgtaagtgatgctcgtgacatagctgtttatgaaataattaaagaggtcaatgcgtacaacagatgtagaaagtctgtcagttccgccttcatcacatttttttttgtgcccagaagaatataataaagctcctttctaatgtacttgtgctggagaacacttgaataaatggactgtttttgtgcaaaaagaaaaatggaaaagcaccgtaataa

SEQ ID NO: 213 - RNA, 9501 nt, Homo sapiens
  source 1..9501: mol_type = other RNA
gcagtgggctctggcggaggtcgggagaactgcagggcgaaggccgccgggggctccgcgggctgcggggggaggcacttgacaccggcccggggagaggaggggccgctgtccctgcggccagtgctggatgcggggacccagcgcagaagcagcgccaggtggagccatcgaagcccccacccacaggctgacagaggcaccgttcaccagagggctcaacaccgggatctatgtttaagttttaactctcgcctccaaagaccacgataattccttccccaaagcccagcagccccccagccccgcgcagccccagcctgcctcccggcgcccagatgcccgccatgccctccagcggccccggggacaccagcagctctgctgcggagcgggaggaggaccgaaaggacggagaggagcaggaggagccgcgtggcaaggaggagcgccaagagcccagcaccacggcacggaaggtggggcggcctgggaggaagcgcaagcaccccccggtggaaagcggtgacacgccaaaggaccctgcggtgatctccaagtccccatccatggcccaggactcaggcgcctcagagctattacccaatggggacttggagaagcggagtgagccccagccagaggaggggagccctgctggggggcagaagggcggggccccagcagagggagagggtgcagctgagaccctgcctgaagcctcaagagcagtggaaaatggctgctgcacccccaaggagggccgaggagcccctgcagaagcgggcaaagaacagaaggagaccaacatcgaatccatgaaaatggagggctcccggggccggctgcggggtggcttgggctgggagtccagcctccgtcagcggcccatgccgaggctcaccttccaggcgggggacccctactacatcagcaagcgcaagcgggacgagtggctggcacgctggaaaagggaggctgagaagaaagccaaggtcattgcaggaatgaatgctgtggaagaaaaccaggggcccggggagtctcagaaggtggaggaggccagccctcctgctgtgcagcagcccactgaccccgcatcccccactgtggctaccacgcctgagcccgtggggtccgatgctggggacaagaatgccaccaaagcaggcgatgacgagccagagtacgaggacggccggggctttggcattggggagctggtgtgggggaaactgcggggcttctcctggtggccaggccgcattgtgtcttggtggatgacgggccggagccgagcagctgaaggcacccgctgggtcatgtggttcggagacggcaaattctcagtggtgtgtgttgagaagctgatgccgctgagctcgttttgcagtgcgttccaccaggccacgtacaacaagcagcccatgtaccgcaaagccatctacgaggtcctgcaggtggccagcagccgcgcggggaagctgttcccggtgtgccacgacagcgatgagagtgacactgccaaggccgtggaggtgcagaacaagcccatgattgaatgggccctggggggcttccagccttctggccctaagggcctggagccaccagaagaagagaagaatccctacaaagaagtgtacacggacatgtgggtggaacctgaggcagctgcctacgcaccacctccaccagccaaaaagccccggaagagcacagcggagaagcccaaggtcaaggagattattgatgagcgcacaagagagcggctggtgtacgaggtgcggcagaagtgccggaacattgaggacatctgcatctcctgtgggagcctcaatgttaccctggaacaccccctcttcgttggaggaatgtgccaaaactgcaagaactgctttctggagtgtgcgtaccagtacgacgacgacggctaccagtcctactgcaccatctgctgtgggggccgtgaggtgctcatgtgcggaaacaacaactgctgcaggtgcttttgcgtggagtgtgtggacctcttggtggggccgggggctgcccaggcagccattaaggaagacccctggaactgctacatgtgcgggcacaagggtacctacgggctgctgcggcggcgagaggactggccctcccggctccagatgttcttcgctaataaccacgaccaggaatttgaccctccaaaggtttacccacctgtcccagctgagaagaggaagcccatccgggtgctgtctctctttgatggaatcgctacagggctcctggtgctgaaggacttgggcattcaggtggaccgctacattgcctcggaggtgtgtgaggactccatcacggtgggcatggtgcggcaccaggggaagatcatgtacgtcggggacgtccgcagcgtcacacagaagcatatccaggagtggggcccattcgatctggtgattgggggcagtccctgcaatgacctctccatcgtcaaccctgctcgcaagggcctctacgagggcactggccggctcttctttgagttctaccgcctcctgcatgatgcgcggcccaaggagggagatgatcgccccttcttctggctctttgagaatgtggtggccatgggcgttagtgacaagagggacatctcgcgatttctcgagtccaaccctgtgatgattgatgccaaagaagtgtcagctgcacacagggcccgctacttctggggtaaccttcccggtatgaacaggccgttggcatccactgtgaatgataagctggagctgcaggagtgtctggagcatggcaggatagccaagttcagcaaagtgaggaccattactacgaggtcaaactccataaagcagggcaaagaccagcattttcctgtcttcatgaatgagaaagaggacatcttatggtgcactgaaatggaaagggtatttggtttcccagtccactatactgacgtctccaacatgagccgcttggcgaggcagagactgctgggccggtcatggagcgtgccagtcatccgccacctcttcgctccgctgaaggagtattttgcgtgtgtgtaagggacatgggggcaaactgaggtagcgacacaaagttaaacaaacaaacaaaaaacacaaaacataataaaacaccaagaacatgaggatggagagaagtatcagcacccagaagagaaaaaggaatttaaaacaaaaaccacagaggcggaaataccggagggctttgccttgcgaaaagggttggacatcatctcctgatttttcaatgttattcttcagtcctatttaaaaacaaaaccaagctcccttcccttcctcccccttcccttttttttcggtcagaccttttattttctactcttttcagaggggttttctgtttgtttgggttttgtttcttgctgtgactgaaacaagaaggttattgcagcaaaaatcagtaacaaaaaatagtaacaataccttgcagaggaaaggtgggagagaggaaaaaaggaaattctatagaaatctatatattgggttgtttttttttttgttttttgttttttttttttgggtttttttttttactatatatcttttttttgttgtctctagcctgatcagataggagcacaagcaggggacggaaagagagagacactcaggcggcagcattccctcccagccactgagctgtcgtgccagcaccattcctggtcacgcaaaacagaacccagttagcagcagggagacgagaacaccacacaagacatttttctacagtatttcaggtgcctaccacacaggaaaccttgaagaaaatcagtttctagaagccgctgttacctcttgtttacagtttatatatatatgatagatatgagatatatatataaaaggtactgttaactactgtacaacccgacttcataatggtgctttcaaacagcgagatgagtaaaaacatcagcttccacgttgccttctgcgcaaagggtttcaccaaggatggagaaagggagacagcttgcagatggcgcgttctcacggtgggctcttccccttggtttgtaacgaagtgaaggaggagaacttgggagccaggttctccctgccaaaaagggggctagatgaggtggtcgggcccgtggacagctgagagtgggattcatccagactcatgcaataaccctttgattgttttctaaaaggagactccctcggcaagatggcagagggtacggagtcttcaggcccagtttctcactttagccaattcgagggctccttgtggtgggatcagaactaatccagagtgtgggaaagtgacagtcaaaaccccacctggagcaaataaaaaaacatacaaaacgtactggtgctttcctgtctaagtcgccttttgtgtgttcttttatgaggcccccaccatccacccctctgtgcacaaggcggctcccggcccctggaatgtgatgtttttggtcatctccaaaggctgcagttttatactgggaggctgatgacaccttttattataattattcttatggttctggttataattatgtttgttttaagattttctttaagaaaacaaaaacccaacacccttccctttaggtttcaaaccaaggtgcgggagcagggtgcttctgagttagcggtggctctggtgccctggctcccacccctcgggccaggtgggccactgggcatggtgacagctgggcggccagggagtccccaaggtctgccttctgggcttgtcactcttctcttctacttcccctcctcttgagtcgggtgtgtcagggctggagggaggaccggccgtctctctccttgtgtgtgtgattggagtggtgtgtatttcttttctagtacttggtctgatgatagctgtgctcttacctcgagtcagcagcacctggagccccaagtgctcaacactttgttctacttcctacaaggcaggcggcctggcgtcagtagtaggaagggatggcattgttggctccagggtgagggcccgacgggcaggtgcttgcctgggtagatggggtgtagatatgtggcatatagagatatatattttataatgggaggggggatggcacctcctgggactggtagagctgggaggtgtgtcggcaagcacatggccccaagtccacgtccctagaaagatggggcctacagtgataggcgctctataaatacatagatagggtcatgtttaagaaatattatggggtggggagtgggggaagcaggcttagtgtgctgagcctcggtccccactgcagacctaaaccccacaccaatcagtcaatctcacacgcatacacaggagcatatttctgtactgatgcataatgaatgcactcacacacacacacacacgccagggggctcccagcactcttctcccagggttcaggactttgtggagtcagcccgtgcagctatttacctctgttgccctgattgcaggtagactgtcaatcccagaagttgctaggtgctgaggcaggaaaaggaggaggtttcttttagcaggtgctctcctctagcaggtagtgttctatctcttttgcccctggtgatgtcaaaagattcttctgttagcaacctgtgatactgacctgcaactctaggcaccagtcaagtcagccctcaactccccctacctattctccccaactgaaatcaaattgacatccaggtctgtcttggccagggggcttccattggggaaaaaaaatgggacagtgaacctcacctattgaataaaccaaattagtaattagtgacaaaaccaaaccaaggctttggaccccctgctcattactcaggagtaaattcacacagctggtggccggtctcacccctttttggggtgcttggtcctggaccccaatctactgtctcctcgacagattggtgtttaagatcatgcccagttgcttcctgtcacctcttgacaggtggtgactgggctgctgtggggctggagcagcgaggaagggagcctctgccccctcagtggagtccctgtgctaactgtggtgctcacccagctcctccttgctcccgcggggctctgtccttcgggcctggagtccaccagcgccactccaggagggctgggggaggaggggctgcctcaggcagtccaaggtgctccctcccccgctggccaatgctaaggtcttcccggctcccagggtcaggacagagtcttctaaggctcaggctctcccaagccactgcttagtgacagttagcctttcccagcggcccaagctccaccggaactgggcctggtgctccaaccaaagggttggtgttgggacttgggaagagacttggtagccaagggcatggcaagcctgggggattcctgtgggccggcttgctcgaggagggagtgctgggcacagaggagcccttatggctgacagcttgagagcacttgttcctccagatctagccacttgaccaggccctagaatggaccagatgccccaggggtcatggcccccccccccccccccttgcagggacgagagttaacaatcaccagcttttcttccggcccagcctgtgtgcttggtctcacagtagaatttaggagagtgtggggctttgggattgtgccaacttggccaagctgagatatgcttaatccacctcaacgctggggcctctggggacaggtattgggtcaccttccaaggggtgctgaacttcagcaggctgtagataaggcagaggttagaggcagtggagtgggggaaccaagaaggcctagggaaaattgccaggcatattccctgtggaattttctttccgaagagtaggcccatttcccccttagaaacaagggttctgggggctgatgacagcttcccctgcaggtgccaggtggcgcatgatgccaaagagatccgtggctcttgcctgggggaggtagccaggtgctcgtgctggggacacagtccttggcctcctgcctaagcaggaagctagtttccagcaggcggctggtactaaccccccgccccacgggagcgacaggctggtgcaccggcagactggggggccgcaggcgggcactagcaggggtctgcagtccatagatgatgacatgaatctgttgctgtccttttgtctctaggccccagagacttcttgctattgaacatcctattggaaagcaaactttccaagagagcacccgggacctgttagcttttgaaacaggcctgggtgtgattgactggtagagatgcctgtgtgatttttggcgcattgcaggagtgtggattgggacaggcaccccagcaggaaggaaggctgacaccaaaggggtctcacagggcccagctccccttgcttcccgataattggccaccaggccatggcgactctggggaagcctagatgggaacacccaccttctccagcagtagaaggaatatttcagcagagccatctgggagatgttcttataggaaaactgcagtcattcatttcatagttttgcttatataaatagagtacatttgggaggcagttttgaattcctgttgctactctgcttggtgcggagttgcagtggccccaagtgtctttcagagctgttgcttttaggatccccctcaagctgtgggttagggccagggcagggagggggtgctgcctggcactgtgccctgaagagggctgcttgcttcctttggtcgggagcacggcagagccaacattctggtgggaaccgagtttctagccaggcccctgttttggtcccgggaggtgagtaatctgagtttgtcattgcgtattctccacgctgcctgctctcagtgctggagactagagagcgaccctggagttgtcctctgggagtcctgcctgtttgccagggagcagctgaaacctccccgctcccaatcccgggggtggaaaaggtgtagtggaggaatggtctggagctgggatggcccttctggccatgccctgctgagccaggattaaggaaagtgtcagccgcctccttaccaggccctgtgctggggtcaggaggaccgggaggagagggaaggggtgagaggatggactctgctgttgtagtgtgagctctggaatctttacgttttggtaaaggcaggccagggtctttgaggatcgagttggggaaccttgcctctgtgtttccgagacccagctaaggtgggcctttggtgggtgacctgtctctgacccgaggcagcagagttttgggggagggagaaacaagcaaggagcagggaggacaaggacacaagatccctttgctggtggtgacttactcacttcccccaccagagggcctgggactcccgaaactcccgtaactggaaagctccctggctcagctccactggggggtgaggagggcggctccctcagccccagcctagcggcctccaaccctgtgcctgagaacatgagcagcggtctaaagcatcccctagtcccatttcacttcacagaccgatttggttgcacagccctagaattcaacagacaacaaaaatgctgaaattccttagaatacgcagagggaggaggtgactcaccaaggtgctaaaacattttattaaaaatatatattgttaaattaagtctgctgtctggacaatgactgtttgttttgttttcttgtagtggagtttaaaagagactattattttactctgatatattattattaaaaaggcattttaactttgtacttgaaaactaaatgagcgatttcatgtgttttagctgaggcattgaagtagcgggtgcttacttatttgtgggaaatcatgtattcatactgaagaataaactccgtagctgatttggtaataacttttactgttacagacgatttcgctttgaccccggtggcagagcacttttactccacattccacgcagctaaatgcaggacttcccagactcttccctccccagccctctttcctttctcttaagttcctcttttctcctttattattattatttttttttcctggttccagcatcctttcaccactgtattttttttttttttttttttttttttttttttttttttttttttttttttttagggttgcttctctatttattgacaataataatgtacatttcacagtctggttctaggacattcagggaagggcgagtgggggcccgaggggtccctgccccacccgcctggtgtcctgttgtatctctgtgtaagtgatgctcgtgacatagctgtttatgaaataattaaagaggtcaatgcgtacaacagatgtagaaagtctgtcagttccgccttcatcacatttttttttgtgcccagaagaatataataaagctcctttctaatgtacttgtgctggagaacacttgaataaatggactgtttttgtgcaaaaagaaaaatggaaaagcaccgtaataa

SEQ ID NO: 214 - RNA, 9421 nt, Homo sapiens
  source 1..9421: mol_type = other RNA
gcgcgggcggcggcggcggcgagagcagaggacgagccgggacgcggcgccgcggcaccagggcgcgcagccgggccggcccgaccccaccggccatacggtggagccatcgaagcccccacccacaggctgacagaggcaccgttcaccagagggctcaacaccgggatctatgtttaagttttaactctcgcctccaaagaccacgataattccttccccaaagcccagcagccccccagccccgcgcagccccagcctgcctcccggcgcccagatgcccgccatgccctccagcggccccggggacaccagcagctctgctgcggagcgggaggaggaccgaaaggacggagaggagcaggaggagccgcgtggcaaggaggagcgccaagagcccagcaccacggcacggaaggtggggcggcctgggaggaagcgcaagcaccccccggtggaaagcggtgacacgccaaaggaccctgcggtgatctccaagtccccatccatggcccaggactcaggcgcctcagagctattacccaatggggacttggagaagcggagtgagccccagccagaggaggggagccctgctggggggcagaagggcggggccccagcagagggagagggtgcagctgagaccctgcctgaagcctcaagagcagtggaaaatggctgctgcacccccaaggagggccgaggagcccctgcagaagcgggcaaagaacagaaggagaccaacatcgaatccatgaaaatggagggctcccggggccggctgcggggtggcttgggctgggagtccagcctccgtcagcggcccatgccgaggctcaccttccaggcgggggacccctactacatcagcaagcgcaagcgggacgagtggctggcacgctggaaaagggaggctgagaagaaagccaaggtcattgcaggaatgaatgctgtggaagaaaaccaggggcccggggagtctcagaaggtggaggaggccagccctcctgctgtgcagcagcccactgaccccgcatcccccactgtggctaccacgcctgagcccgtggggtccgatgctggggacaagaatgccaccaaagcaggcgatgacgagccagagtacgaggacggccggggctttggcattggggagctggtgtgggggaaactgcggggcttctcctggtggccaggccgcattgtgtcttggtggatgacgggccggagccgagcagctgaaggcacccgctgggtcatgtggttcggagacggcaaattctcagtggtgtgtgttgagaagctgatgccgctgagctcgttttgcagtgcgttccaccaggccacgtacaacaagcagcccatgtaccgcaaagccatctacgaggtcctgcaggtggccagcagccgcgcggggaagctgttcccggtgtgccacgacagcgatgagagtgacactgccaaggccgtggaggtgcagaacaagcccatgattgaatgggccctggggggcttccagccttctggccctaagggcctggagccaccagaagaagagaagaatccctacaaagaagtgtacacggacatgtgggtggaacctgaggcagctgcctacgcaccacctccaccagccaaaaagccccggaagagcacagcggagaagcccaaggtcaaggagattattgatgagcgcacaagagagcggctggtgtacgaggtgcggcagaagtgccggaacattgaggacatctgcatctcctgtgggagcctcaatgttaccctggaacaccccctcttcgttggaggaatgtgccaaaactgcaagaactgctttctggagtgtgcgtaccagtacgacgacgacggctaccagtcctactgcaccatctgctgtgggggccgtgaggtgctcatgtgcggaaacaacaactgctgcaggtgcttttgcgtggagtgtgtggacctcttggtggggccgggggctgcccaggcagccattaaggaagacccctggaactgctacatgtgcgggcacaagggtacctacgggctgctgcggcggcgagaggactggccctcccggctccagatgttcttcgctaataaccacgaccaggaatttgaccctccaaaggtttacccacctgtcccagctgagaagaggaagcccatccgggtgctgtctctctttgatggaatcgctacagggctcctggtgctgaaggacttgggcattcaggtggaccgctacattgcctcggaggtgtgtgaggactccatcacggtgggcatggtgcggcaccaggggaagatcatgtacgtcggggacgtccgcagcgtcacacagaagcatatccaggagtggggcccattcgatctggtgattgggggcagtccctgcaatgacctctccatcgtcaaccctgctcgcaagggcctctacgagggcactggccggctcttctttgagttctaccgcctcctgcatgatgcgcggcccaaggagggagatgatcgccccttcttctggctctttgagaatgtggtggccatgggcgttagtgacaagagggacatctcgcgatttctcgagtccaaccctgtgatgattgatgccaaagaagtgtcagctgcacacagggcccgctacttctggggtaaccttcccggtatgaacaggccgttggcatccactgtgaatgataagctggagctgcaggagtgtctggagcatggcaggatagccaagttcagcaaagtgaggaccattactacgaggtcaaactccataaagcagggcaaagaccagcattttcctgtcttcatgaatgagaaagaggacatcttatggtgcactgaaatggaaagggtatttggtttcccagtccactatactgacgtctccaacatgagccgcttggcgaggcagagactgctgggccggtcatggagcgtgccagtcatccgccacctcttcgctccgctgaaggagtattttgcgtgtgtgtaagggacatgggggcaaactgaggtagcgacacaaagttaaacaaacaaacaaaaaacacaaaacataataaaacaccaagaacatgaggatggagagaagtatcagcacccagaagagaaaaaggaatttaaaacaaaaaccacagaggcggaaataccggagggctttgccttgcgaaaagggttggacatcatctcctgatttttcaatgttattcttcagtcctatttaaaaacaaaaccaagctcccttcccttcctcccccttcccttttttttcggtcagaccttttattttctactcttttcagaggggttttctgtttgtttgggttttgtttcttgctgtgactgaaacaagaaggttattgcagcaaaaatcagtaacaaaaaatagtaacaataccttgcagaggaaaggtgggagagaggaaaaaaggaaattctatagaaatctatatattgggttgtttttttttttgttttttgttttttttttttgggtttttttttttactatatatcttttttttgttgtctctagcctgatcagataggagcacaagcaggggacggaaagagagagacactcaggcggcagcattccctcccagccactgagctgtcgtgccagcaccattcctggtcacgcaaaacagaacccagttagcagcagggagacgagaacaccacacaagacatttttctacagtatttcaggtgcctaccacacaggaaaccttgaagaaaatcagtttctagaagccgctgttacctcttgtttacagtttatatatatatgatagatatgagatatatatataaaaggtactgttaactactgtacaacccgacttcataatggtgctttcaaacagcgagatgagtaaaaacatcagcttccacgttgccttctgcgcaaagggtttcaccaaggatggagaaagggagacagcttgcagatggcgcgttctcacggtgggctcttccccttggtttgtaacgaagtgaaggaggagaacttgggagccaggttctccctgccaaaaagggggctagatgaggtggtcgggcccgtggacagctgagagtgggattcatccagactcatgcaataaccctttgattgttttctaaaaggagactccctcggcaagatggcagagggtacggagtcttcaggcccagtttctcactttagccaattcgagggctccttgtggtgggatcagaactaatccagagtgtgggaaagtgacagtcaaaaccccacctggagcaaataaaaaaacatacaaaacgtactggtgctttcctgtctaagtcgccttttgtgtgttcttttatgaggcccccaccatccacccctctgtgcacaaggcggctcccggcccctggaatgtgatgtttttggtcatctccaaaggctgcagttttatactgggaggctgatgacaccttttattataattattcttatggttctggttataattatgtttgttttaagattttctttaagaaaacaaaaacccaacacccttccctttaggtttcaaaccaaggtgcgggagcagggtgcttctgagttagcggtggctctggtgccctggctcccacccctcgggccaggtgggccactgggcatggtgacagctgggcggccagggagtccccaaggtctgccttctgggcttgtcactcttctcttctacttcccctcctcttgagtcgggtgtgtcagggctggagggaggaccggccgtctctctccttgtgtgtgtgattggagtggtgtgtatttcttttctagtacttggtctgatgatagctgtgctcttacctcgagtcagcagcacctggagccccaagtgctcaacactttgttctacttcctacaaggcaggcggcctggcgtcagtagtaggaagggatggcattgttggctccagggtgagggcccgacgggcaggtgcttgcctgggtagatggggtgtagatatgtggcatatagagatatatattttataatgggaggggggatggcacctcctgggactggtagagctgggaggtgtgtcggcaagcacatggccccaagtccacgtccctagaaagatggggcctacagtgataggcgctctataaatacatagatagggtcatgtttaagaaatattatggggtggggagtgggggaagcaggcttagtgtgctgagcctcggtccccactgcagacctaaaccccacaccaatcagtcaatctcacacgcatacacaggagcatatttctgtactgatgcataatgaatgcactcacacacacacacacacgccagggggctcccagcactcttctcccagggttcaggactttgtggagtcagcccgtgcagctatttacctctgttgccctgattgcaggtagactgtcaatcccagaagttgctaggtgctgaggcaggaaaaggaggaggtttcttttagcaggtgctctcctctagcaggtagtgttctatctcttttgcccctggtgatgtcaaaagattcttctgttagcaacctgtgatactgacctgcaactctaggcaccagtcaagtcagccctcaactccccctacctattctccccaactgaaatcaaattgacatccaggtctgtcttggccagggggcttccattggggaaaaaaaatgggacagtgaacctcacctattgaataaaccaaattagtaattagtgacaaaaccaaaccaaggctttggaccccctgctcattactcaggagtaaattcacacagctggtggccggtctcacccctttttggggtgcttggtcctggaccccaatctactgtctcctcgacagattggtgtttaagatcatgcccagttgcttcctgtcacctcttgacaggtggtgactgggctgctgtggggctggagcagcgaggaagggagcctctgccccctcagtggagtccctgtgctaactgtggtgctcacccagctcctccttgctcccgcggggctctgtccttcgggcctggagtccaccagcgccactccaggagggctgggggaggaggggctgcctcaggcagtccaaggtgctccctcccccgctggccaatgctaaggtcttcccggctcccagggtcaggacagagtcttctaaggctcaggctctcccaagccactgcttagtgacagttagcctttcccagcggcccaagctccaccggaactgggcctggtgctccaaccaaagggttggtgttgggacttgggaagagacttggtagccaagggcatggcaagcctgggggattcctgtgggccggcttgctcgaggagggagtgctgggcacagaggagcccttatggctgacagcttgagagcacttgttcctccagatctagccacttgaccaggccctagaatggaccagatgccccaggggtcatggcccccccccccccccccttgcagggacgagagttaacaatcaccagcttttcttccggcccagcctgtgtgcttggtctcacagtagaatttaggagagtgtggggctttgggattgtgccaacttggccaagctgagatatgcttaatccacctcaacgctggggcctctggggacaggtattgggtcaccttccaaggggtgctgaacttcagcaggctgtagataaggcagaggttagaggcagtggagtgggggaaccaagaaggcctagggaaaattgccaggcatattccctgtggaattttctttccgaagagtaggcccatttcccccttagaaacaagggttctgggggctgatgacagcttcccctgcaggtgccaggtggcgcatgatgccaaagagatccgtggctcttgcctgggggaggtagccaggtgctcgtgctggggacacagtccttggcctcctgcctaagcaggaagctagtttccagcaggcggctggtactaaccccccgccccacgggagcgacaggctggtgcaccggcagactggggggccgcaggcgggcactagcaggggtctgcagtccatagatgatgacatgaatctgttgctgtccttttgtctctaggccccagagacttcttgctattgaacatcctattggaaagcaaactttccaagagagcacccgggacctgttagcttttgaaacaggcctgggtgtgattgactggtagagatgcctgtgtgatttttggcgcattgcaggagtgtggattgggacaggcaccccagcaggaaggaaggctgacaccaaaggggtctcacagggcccagctccccttgcttcccgataattggccaccaggccatggcgactctggggaagcctagatgggaacacccaccttctccagcagtagaaggaatatttcagcagagccatctgggagatgttcttataggaaaactgcagtcattcatttcatagttttgcttatataaatagagtacatttgggaggcagttttgaattcctgttgctactctgcttggtgcggagttgcagtggccccaagtgtctttcagagctgttgcttttaggatccccctcaagctgtgggttagggccagggcagggagggggtgctgcctggcactgtgccctgaagagggctgcttgcttcctttggtcgggagcacggcagagccaacattctggtgggaaccgagtttctagccaggcccctgttttggtcccgggaggtgagtaatctgagtttgtcattgcgtattctccacgctgcctgctctcagtgctggagactagagagcgaccctggagttgtcctctgggagtcctgcctgtttgccagggagcagctgaaacctccccgctcccaatcccgggggtggaaaaggtgtagtggaggaatggtctggagctgggatggcccttctggccatgccctgctgagccaggattaaggaaagtgtcagccgcctccttaccaggccctgtgctggggtcaggaggaccgggaggagagggaaggggtgagaggatggactctgctgttgtagtgtgagctctggaatctttacgttttggtaaaggcaggccagggtctttgaggatcgagttggggaaccttgcctctgtgtttccgagacccagctaaggtgggcctttggtgggtgacctgtctctgacccgaggcagcagagttttgggggagggagaaacaagcaaggagcagggaggacaaggacacaagatccctttgctggtggtgacttactcacttcccccaccagagggcctgggactcccgaaactcccgtaactggaaagctccctggctcagctccactggggggtgaggagggcggctccctcagccccagcctagcggcctccaaccctgtgcctgagaacatgagcagcggtctaaagcatcccctagtcccatttcacttcacagaccgatttggttgcacagccctagaattcaacagacaacaaaaatgctgaaattccttagaatacgcagagggaggaggtgactcaccaaggtgctaaaacattttattaaaaatatatattgttaaattaagtctgctgtctggacaatgactgtttgttttgttttcttgtagtggagtttaaaagagactattattttactctgatatattattattaaaaaggcattttaactttgtacttgaaaactaaatgagcgatttcatgtgttttagctgaggcattgaagtagcgggtgcttacttatttgtgggaaatcatgtattcatactgaagaataaactccgtagctgatttggtaataacttttactgttacagacgatttcgctttgaccccggtggcagagcacttttactccacattccacgcagctaaatgcaggacttcccagactcttccctccccagccctctttcctttctcttaagttcctcttttctcctttattattattatttttttttcctggttccagcatcctttcaccactgtattttttttttttttttttttttttttttttttttttttttttttttttttttagggttgcttctctatttattgacaataataatgtacatttcacagtctggttctaggacattcagggaagggcgagtgggggcccgaggggtccctgccccacccgcctggtgtcctgttgtatctctgtgtaagtgatgctcgtgacatagctgtttatgaaataattaaagaggtcaatgcgtacaacagatgtagaaagtctgtcagttccgccttcatcacatttttttttgtgcccagaagaatataataaagctcctttctaatgtacttgtgctggagaacacttgaataaatggactgtttttgtgcaaaaagaaaaa

SEQ ID NO: 215 - RNA, 1775 nt, Homo sapiens
  source 1..1775: mol_type = other RNA
gcagtgggctctggcggaggtcgggagaactgcagggcgaaggccgccgggggctccgcgggctgcggggggaggcacttgacaccggcccggggagaggaggggccgctgtccctgcggccagtgctggatgcggggacccagcgcagaagcagcgccaggtggagccatcgaagcccccacccacaggctgacagaggcaccgttcaccagagggctcaacaccgggatctatgtttaagttttaactctcgcctccaaagaccacgataattccttccccaaagcccagcagccccccagccccgcgcagccccagcctgcctcccggcgcccagatgcccgccatgccctccagcggccccggggacaccagcagctctgctgcggagcgggaggaggaccgaaaggacggagaggagcaggaggagccgcgtggcaaggaggagcgccaagagcccagcaccacggcacggaaggtggggcggcctgggaggaagcgcaagcaccccccggtggaaagcggtgacacgccaaaggaccctgcggtgatctccaagtccccatccatggcccaggactcaggcgcctcagagctattacccaatggggacttggagaagcggagtgagccccagccagaggaggggagccctgctggggggcagaagggcggggccccagcagagggagagggtgcagctgagaccctgcctgaagcctcaagagcagtggaaaatggctgctgcacccccaaggagggccgaggagcccctgcagaagcgggtgagtcctcagcaccaggggcagcctcttctgggcccaccagcataccctgagagtcagggacttggctctccagcaggtcccaggaaggatggtctgggtcgtggctaaaggtctgcttgccaaggctatggcctggaggctactggctggatgcagcctgcgcatatgttttatttggcccatagagtgttttaaacatttaaaaaattagttgccagtatttaaaaatcaaaaaatttcacataaaaatctggagttttggcttctcatgaaaaaaaaaaaagctagatctggcaacagcgggctttcataacgccaacgattgctagactgggataatggcggtccctccatcgccttctgtggctggttgtgggccttagttttctgcagctctacctggcctgcttactctcccacgtgccatgcagttcctgggggttgctgtatttgtagcccctggcctgggcactcaagggcagcagataccctgtttgcctccctgagtgcagaggtcctgagcccaccctagttgggctgactcaactggaaatttggttgtgacagtggcgtggggagagggctgggtgattgtattctgtgtactgcccagcccaggcctcttcatctggggactttttggcctaaccctggaagcctggaaagttgcccacttttctctttcaggttaagccagcaatttcagggccaaccgagctgtaaacatgttagtaatgaggacaactagcatttgtacagggcttcacagtttacaaagcgctttctcatacattatcacatttgatcctcccagggccctgccaggttgttttgcatatgtgcattttaatttcaaaaagtcttccttccaagcgtgtatgatgaaatgagtaaattgattaattggcgtaacttattttgcatggatccaacctaatgttcatgcaggatagagaacatttccagaatacaaatttccaaactta

SEQ ID NO: 216 - RNA, 3589 nt, Homo sapiens
  source 1..3589: mol_type = other RNA
ccgcccccagccccatcgcccccttcccctcccccaagacgggcagctacttccagagcttcagggccgcggctcacacctgagcgcgactgcagaggggctgcacctggccttatggggatcctggagcgggttgtgagaaggaatgggcgcgtggatcgtagcctgaaagacgagtgtgatacggctgagaagaaagccaaggtcattgcaggaatgaatgctgtggaagaaaaccaggggcccggggagtctcagaaggtggaggaggccagccctcctgctgtgcagcagcccactgaccccgcatcccccactgtggctaccacgcctgagcccgtggggtccgatgctggggacaagaatgccaccaaagcaggcgatgacgagccagagtacgaggacggccggggctttggcattggggagctggtgtgggggaaactgcggggcttctcctggtggccaggccgcattgtgtcttggtggatgacgggccggagccgagcagctgaaggcacccgctgggtcatgtggttcggagacggcaaattctcagtggtgtgtgttgagaagctgatgccgctgagctcgttttgcagtgcgttccaccaggccacgtacaacaagcagcccatgtaccgcaaagccatctacgaggtcctgcaggtggccagcagccgcgcggggaagctgttcccggtgtgccacgacagcgatgagagtgacactgccaaggccgtggaggtgcagaacaagcccatgattgaatgggccctggggggcttccagccttctggccctaagggcctggagccaccagaagaagagaagaatccctacaaagaagtgtacacggacatgtgggtggaacctgaggcagctgcctacgcaccacctccaccagccaaaaagccccggaagagcacagcggagaagcccaaggtcaaggagattattgatgagcgcacaagagagcggctggtgtacgaggtgcggcagaagtgccggaacattgaggacatctgcatctcctgtgggagcctcaatgttaccctggaacaccccctcttcgttggaggaatgtgccaaaactgcaagaactgctttctggagtgtgcgtaccagtacgacgacgacggctaccagtcctactgcaccatctgctgtgggggccgtgaggtgctcatgtgcggaaacaacaactgctgcaggtgcttttgcgtggagtgtgtggacctcttggtggggccgggggctgcccaggcagccattaaggaagacccctggaactgctacatgtgcgggcacaagggtacctacgggctgctgcggcggcgagaggactggccctcccggctccagatgttcttcgctaataaccacgaccaggaatttgaccctccaaaggtttacccacctgtcccagctgagaagaggaagcccatccgggtgctgtctctctttgatggaatcgctacagggctcctggtgctgaaggacttgggcattcaggtggaccgctacattgcctcggaggtgtgtgaggactccatcacggtgggcatggtgcggcaccaggggaagatcatgtacgtcggggacgtccgcagcgtcacacagaagcatatccaggagtggggcccattcgatctggtgattgggggcagtccctgcaatgacctctccatcgtcaaccctgctcgcaagggcctctacgagggcactggccggctcttctttgagttctaccgcctcctgcatgatgcgcggcccaaggagggagatgatcgccccttcttctggctctttgagaatgtggtggccatgggcgttagtgacaagagggacatctcgcgatttctcgagtccaaccctgtgatgattgatgccaaagaagtgtcagctgcacacagggcccgctacttctggggtaaccttcccggtatgaacaggccgttggcatccactgtgaatgataagctggagctgcaggagtgtctggagcatggcaggatagccaagttcagcaaagtgaggaccattactacgaggtcaaactccataaagcagggcaaagaccagcattttcctgtcttcatgaatgagaaagaggacatcttatggtgcactgaaatggaaagggtatttggtttcccagtccactatactgacgtctccaacatgagccgcttggcgaggcagagactgctgggccggtcatggagcgtgccagtcatccgccacctcttcgctccgctgaaggagtattttgcgtgtgtgtaagggacatgggggcaaactgaggtagcgacacaaagttaaacaaacaaacaaaaaacacaaaacataataaaacaccaagaacatgaggatggagagaagtatcagcacccagaagagaaaaaggaatttaaaacaaaaaccacagaggcggaaataccggagggctttgccttgcgaaaagggttggacatcatctcctgatttttcaatgttattcttcagtcctatttaaaaacaaaaccaagctcccttcccttcctcccccttcccttttttttcggtcagaccttttattttctactcttttcagaggggttttctgtttgtttgggttttgtttcttgctgtgactgaaacaagaaggttattgcagcaaaaatcagtaacaaaaaatagtaacaataccttgcagaggaaaggtgggagagaggaaaaaaggaaattctatagaaatctatatattgggttgtttttttttttgttttttgttttttttttttgggtttttttttttactatatatcttttttttgttgtctctagcctgatcagataggagcacaagcaggggacggaaagagagagacactcaggcggcagcattccctcccagccactgagctgtcgtgccagcaccattcctggtcacgcaaaacagaacccagttagcagcagggagacgagaacaccacacaagacatttttctacagtatttcaggtgcctaccacacaggaaaccttgaagaaaatcagtttctagaagccgctgttacctcttgtttacagtttatatatatatgatagatatgagatatatatataaaaggtactgttaactactgtacaacccgacttcataatggtgctttcaaacagcgagatgagtaaaaacatcagcttccacgttgccttctgcgcaaagggtttcaccaaggatggagaaagggagacagcttgcagatggcgcgttctcacggtgggctcttccccttggtttgtaacgaagtgaaggaggagaacttgggagccaggttctccctgccaaaaagggggctagatgaggtggtcgggcccgtggacagctgagagtgggattcatccagactcatgcaataaccctttgattgttttctaaaaggagactccctcggcaagatggcagagggtacggagtcttcaggcccagtttctcactttagccaattcgagggctccttgtggtgggatcagaactaatccagagtgtgggaaagtgacagtcaaaaccccacctggagcaaataaaaaaacatacaaaacgta

SEQ ID NO: 217 - RNA, 2300 nt, Homo sapiens
  source 1..2300: mol_type = other RNA
ccgcccccagccccatcgcccccttcccctcccccaagacgggcagctacttccagagcttcagggccgcggctcacacctgagcgcgactgcagaggggctgcacctggccttatgggctgagaagaaagccaaggtcattgcaggaatgaatgctgtggaagaaaaccaggggcccggggagtctcagaaggtggaggaggccagccctcctgctgtgcagcagcccactgaccccgcatcccccactgtggctaccacgcctgagcccgtggggtccgatgctggggacaagaatgccaccaaagcaggcgatgacgagccagagtacgaggacggccggggctttggcattggggagctggtgtgggggaaactgcggggcttctcctggtggccaggccgcattgtgtcttggtggatgacgggccggagccgagcagctgaaggcacccgctgggtcatgtggttcggagacggcaaattctcagtggtgtgtgttgagaagctgatgccgctgagctcgttttgcagtgcgttccaccaggccacgtacaacaagcagcccatgtaccgcaaagccatctacgaggtcctgcaggtggccagcagccgcgcggggaagctgttcccggtgtgccacgacagcgatgagagtgacactgccaaggccgtggaggtgcagaacaagcccatgattgaatgggccctggggggcttccagccttctggccctaagggcctggagccaccagaagaagagaagaatccctacaaagaagtgtacacggacatgtgggtggaacctgaggcagctgcctacgcaccacctccaccagccaaaaagccccggaagagcacagcggagaagcccaaggtcaaggagattattgatgagcgcacaagagagcggctggtgtacgaggtgcggcagaagtgccggaacattgaggacatctgcatctcctgtgggagcctcaatgttaccctggaacaccccctcttcgttggaggaatgtgccaaaactgcaagaactgctttctggagtgtgcgtaccagtacgacgacgacggctaccagtcctactgcaccatctgctgtgggggccgtgaggtgctcatgtgcggaaacaacaactgctgcaggtgcttttgcgtggagtgtgtggacctcttggtggggccgggggctgcccaggcagccattaaggaagacccctggaactgctacatgtgcgggcacaagggtacctacgggctgctgcggcggcgagaggactggccctcccggctccagatgttcttcgctaataaccacgaccaggaatttgaccctccaaaggtttacccacctgtcccagctgagaagaggaagcccatccgggtgctgtctctctttgatggaatcgctacagggctcctggtgctgaaggacttgggcattcaggtggaccgctacattgcctcggaggtgtgtgaggactccatcacggtgggcatggtgcggcaccaggggaagatcatgtacgtcggggacgtccgcagcgtcacacagaagcatatccaggagtggggcccattcgatctggtgattgggggcagtccctgcaatgacctctccatcgtcaaccctgctcgcaagggcctctacgagggcactggccggctcttctttgagttctaccgcctcctgcatgatgcgcggcccaaggagggagatgatcgccccttcttctggctctttgagaatgtggtggccatgggcgttagtgacaagagggacatctcgcgatttctcgagtccaaccctgtgatgattgatgccaaagaagtgtcagctgcacacagggcccgctacttctggggtaaccttcccggtatgaacaggccgttggcatccactgtgaatgataagctggagctgcaggagtgtctggagcatggcaggatagccaagttcagcaaagtgaggaccattactacgaggtcaaactccataaagcagggcaaagaccagcattttcctgtcttcatgaatgagaaagaggacatcttatggtgcactgaaatggaaagggtatttggtttcccagtccactatactgacgtctccaacatgagccgcttggcgaggcagagactgctgggccggtcatggagcgtgccagtcatccgccacctcttcgctccgctgaaggagtattttgcgtgtgtgtaagggacatgggggcaaactgaggtagcgacacaaagttaaacaaacaaacaaaaaacacaaaacataataaaacaccaagaac

SEQ ID NO: 218 - RNA, 4395 nt, Homo sapiens
  source 1..4395: mol_type = other RNA
gcagtgggctctggcggaggtcgggagaactgcagggcgaaggccgccgggggctccgcgggctgcggggggaggcacttgacaccggcccggggagaggaggggccgctgtccctgcggccagtgctggatgcggggacccagcgcagaagcagcgccaggtggagccatcgaagcccccacccacaggctgacagaggcaccgttcaccagagggctcaacaccgggatctatgtttaagttttaactctcgcctccaaagaccacgataattccttccccaaagcccagcagccccccagccccgcgcagccccagcctgcctcccggcgcccagatgcccgccatgccctccagcggccccggggacaccagcagctctgctgcggagcgggaggaggaccgaaaggacggagaggagcaggaggagccgcgtggcaaggaggagcgccaagagcccagcaccacggcacggaaggtggggcggcctgggaggaagcgcaagcaccccccggtggaaagcggtgacacgccaaaggaccctgcggtgatctccaagtccccatccatggcccaggactcaggcgcctcagagctattacccaatggggacttggagaagcggagtgagccccagccagaggaggggagccctgctggggggcagaagggcggggccccagcagagggagagggtgcagctgagaccctgcctgaagcctcaagagcagtggaaaatggctgctgcacccccaaggagggccgaggagcccctgcagaagcgggcaaagaacagaaggagaccaacatcgaatccatgaaaatggagggctcccggggccggctgcggggtggcttgggctgggagtccagcctccgtcagcggcccatgccgaggctcaccttccaggcgggggacccctactacatcagcaagcgcaagcgggacgagtggctggcacgctggaaaagggaggctgagaagaaagccaaggtcattgcaggaatgaatgctgtggaagaaaaccaggggcccggggagtctcagaaggtggaggaggccagccctcctgctgtgcagcagcccactgaccccgcatcccccactgtggctaccacgcctgagcccgtggggtccgatgctggggacaagaatgccaccaaagcaggcgatgacgagccagagtacgaggacggccggggctttggcattggggagctggtgtgggggaaactgcggggcttctcctggtggccaggccgcattgtgtcttggtggatgacgggccggagccgagcagctgaaggcacccgctgggtcatgtggttcggagacggcaaattctcagtggtgtgtgttgagaagctgatgccgctgagctcgttttgcagtgcgttccaccaggccacgtacaacaagcagcccatgtaccgcaaagccatctacgaggtcctgcaggtggccagcagccgcgcggggaagctgttcccggtgtgccacgacagcgatgagagtgacactgccaaggccgtggaggtgcagaacaagcccatgattgaatgggccctggggggcttccagccttctggccctaagggcctggagccaccagaagaagagaagaatccctacaaagaagtgtacacggacatgtgggtggaacctgaggcagctgcctacgcaccacctccaccagccaaaaagccccggaagagcacagcggagaagcccaaggtcaaggagattattgatgagcgcacaagagagcggctggtgtacgaggtgcggcagaagtgccggaacattgaggacatctgcatctcctgtgggagcctcaatgttaccctggaacaccccctcttcgttggaggaatgtgccaaaactgcaagaactgctttctggagtgtgcgtaccagtacgacgacgacggctaccagtcctactgcaccatctgctgtgggggccgtgaggtgctcatgtgcggaaacaacaactgctgcaggtgcttttgcgtggagtgtgtggacctcttggtggggccgggggctgcccaggcagccattaaggaagacccctggaactgctacatgtgcgggcacaagggtacctacgggctgctgcggcggcgagaggactggccctcccggctccagatgttcttcgctaataaccacgaccaggaatttgaccctccaaaggtttacccacctgtcccagctgagaagaggaagcccatccgggtgctgtctctctttgatggaatcgctacagggctcctggtgctgaaggacttgggcattcaggtggaccgctacattgcctcggaggtgtgtgaggactccatcacggtgggcatggtgcggcaccaggggaagatcatgtacgtcggggacgtccgcagcgtcacacagaagcatatccaggagtggggcccattcgatctggtgattgggggcagtccctgcaatgacctctccatcgtcaaccctgctcgcaagggcctctacgagggcactggccggctcttctttgagttctaccgcctcctgcatgatgcgcggcccaaggagggagatgatcgccccttcttctggctctttgagaatgtggtggccatgggcgttagtgacaagagggacatctcgcgatttctcgagtccaaccctgtgatgattgatgccaaagaagtgtcagctgcacacagggcccgctacttctggggtaaccttcccggtatgaacaggccgttggcatccactgtgaatgataagctggagctgcaggagtgtctggagcatggcaggatagccaagttcagcaaagtgaggaccattactacgaggtcaaactccataaagcagggcaaagaccagcattttcctgtcttcatgaatgagaaagaggacatcttatggtgcactgaaatggaaagggtatttggtttcccagtccactatactgacgtctccaacatgagccgcttggcgaggcagagactgctgggccggtcatggagcgtgccagtcatccgccacctcttcgctccgctgaaggagtattttgcgtgtgtgtaagggacatgggggcaaactgaggtagcgacacaaagttaaacaaacaaacaaaaaacacaaaacataataaaacaccaagaacatgaggatggagagaagtatcagcacccagaagagaaaaaggaatttaaaacaaaaaccacagaggcggaaataccggagggctttgccttgcgaaaagggttggacatcatctcctgatttttcaatgttattcttcagtcctatttaaaaacaaaaccaagctcccttcccttcctcccccttcccttttttttcggtcagaccttttattttctactcttttcagaggggttttctgtttgtttgggttttgtttcttgctgtgactgaaacaagaaggttattgcagcaaaaatcagtaacaaaaaatagtaacaataccttgcagaggaaaggtgggagagaggaaaaaaggaaattctatagaaatctatatattgggttgtttttttttttgttttttgttttttttttttgggtttttttttttactatatatcttttttttgttgtctctagcctgatcagataggagcacaagcaggggacggaaagagagagacactcaggcggcagcattccctcccagccactgagctgtcgtgccagcaccattcctggtcacgcaaaacagaacccagttagcagcagggagacgagaacaccacacaagacatttttctacagtatttcaggtgcctaccacacaggaaaccttgaagaaaatcagtttctagaagccgctgttacctcttgtttacagtttatatatatatgatagatatgagatatatatataaaaggtactgttaactactgtacaacccgacttcataatggtgctttcaaacagcgagatgagtaaaaacatcagcttccacgttgccttctgcgcaaagggtttcaccaaggatggagaaagggagacagcttgcagatggcgcgttctcacggtgggctcttccccttggtttgtaacgaagtgaaggaggagaacttgggagccaggttctccctgccaaaaagggggctagatgaggtggtcgggcccgtggacagctgagagtgggattcatccagactcatgcaataaccctttgattgttttctaaaaggagactccctcggcaagatggcagagggtacggagtcttcaggcccagtttctcactttagccaattcgagggctccttgtggtgggatcagaactaatccagagtgtgggaaagtgacagtcaaaaccccacctggagcaaataaaaaaacatacaaaacgtactggtgctttcctgt

SEQ ID NO: 219 - RNA, 1714 nt, Homo sapiens
  source 1..1714: mol_type = other RNA
gcgcgggcggcggcggcggcgagagcagaggacgagccgggacgcggcgccgcggcaccagggcgcgcagccgggccggcccgaccccaccggccatacggtggagccatcgaagcccccacccacaggctgacagaggcaccgttcaccagagggctcaacaccgggatctatgtttaagttttaactctcgcctccaaagaccacgataattccttccccaaagcccagcagccccccagccccgcgcagccccagcctgcctcccggcgcccagatgcccgccatgccctccagcggccccggggacaccagcagctctgctgcggagcgggaggaggaccgaaaggacggagaggagcaggaggagccgcgtggcaaggaggagcgccaagagcccagcaccacggcacggaaggtggggcggcctgggaggaagcgcaagcaccccccggtggaaagcggtgacacgccaaaggaccctgcggtgatctccaagtccccatccatggcccaggactcaggcgcctcagagctattacccaatggggacttggagaagcggagtgagccccagccagaggaggggagccctgctggggggcagaagggcggggccccagcagagggagagggtgcagctgagaccctgcctgaagcctcaagagcagtggaaaatggctgctgcacccccaaggagggccgaggagcccctgcagaagcgggtgagtcctcagcaccaggggcagcctcttctgggcccaccagcataccctgagagtcagggacttggctctccagcaggtcccaggaaggatggtctgggtcgtggctaaaggtctgcttgccaaggctatggcctggaggctactggctggatgcagcctgcgcatatgttttatttggcccatagagtgttttaaacatttaaaaaattagttgccagtatttaaaaatcaaaaaatttcacataaaaatctggagttttggcttctcatgaaaaaaaaaaaagctagatctggcaacagcgggctttcataacgccaacgattgctagactgggataatggcggtccctccatcgccttctgtggctggttgtgggccttagttttctgcagctctacctggcctgcttactctcccacgtgccatgcagttcctgggggttgctgtatttgtagcccctggcctgggcactcaagggcagcagataccctgtttgcctccctgagtgcagaggtcctgagcccaccctagttgggctgactcaactggaaatttggttgtgacagtggcgtggggagagggctgggtgattgtattctgtgtactgcccagcccaggcctcttcatctggggactttttggcctaaccctggaagcctggaaagttgcccacttttctctttcaggttaagccagcaatttcagggccaaccgagctgtaaacatgttagtaatgaggacaactagcatttgtacagggcttcacagtttacaaagcgctttctcatacattatcacatttgatcctcccagggccctgccaggttgttttgcatatgtgcattttaatttcaaaaagtcttccttccaagcgtgtatgatgaaatgagtaaattgattaattggcgtaacttattttgcatggatccaacctaatgttcatgcaggatagagaacatttccagaatacaaatttccaaactta

SEQ ID NO: 220 - RNA, 1808 nt, Homo sapiens
  source 1..1808: mol_type = other RNA
gcagtgggctctggcggaggtcgggagaactgcagggcgaaggccgccgggggctccgcgggctgcggggggaggcacttgacaccggcccggggagaggaggggccgctgtccctgcggccagtgctggatgcggggacccagcgcagaagcagcgccaggtggagccatcgaagcccccacccacaggctgacagaggcaccgttcaccagagggctcaacaccgggatctatgtttaagttttaactctcgcctccaaagaccacgataattccttccccaaagcccagcagccccccagccccgcgcagccccagcctgcctcccggcgcccagatgcccgccatgccctccagcggccccggggacaccagcagctctgctgcggagcgggaggaggaccgaaaggacggagaggagcaggaggagccgcgtggcaaggaggagcgccaagagcccagcaccacggcacggaaggtggggcggcctgggaggaagcgcaagcaccccccggtggaaagcggtgacacgccaaaggaccctgcggtgatctccaagtccccatccatggcccaggactcaggcgcctcagagctattacccaatggggacttggagaagcggagtgagccccagccagaggaggggagccctgctggggggcagaagggcggggccccagcagagggagagggtgcagctgagaccctgcctgaagcctcaagagcagtggaaaatggctgctgcacccccaaggagggccgaggagcccctgcagaagcgggtgagtcctcagcaccaggggcagcctcttctgggcccaccagcataccctgagagtcagggacttggctctccagcaggtcccaggaaggatggtctgggtcgtggctaaaggtctgcttgccaaggctatggcctggaggctactggctggatgcagcctgcgcatatgttttatttggcccatagagtgttttaaacatttaaaaaattagttgccagtatttaaaaatcaaaaaatttcacataaaaatctggagttttggcttctcatgaaaaaaaaaaaagctagatctggcaacagcgggctttcataacgccaacgattgctagactgggataatggcggtccctccatcgccttctgtggctggttgtgggccttagttttctgcagctctacctggcctgcttactctcccacgtgccatgcagttcctgggggttgctgtatttgtagcccctggcctgggcactcaagggcagcagataccctgtttgcctccctgagtgcagaggtcctgagcccaccctagttgggctgactcaactggaaatttggttgtgacagtggcgtggggagagggctgggtgattgtattctgtgtactgcccagcccaggcctcttcatctggggactttttggcctaaccctggaagcctggaaagttgcccacttttctctttcaggttaagccagcaatttcagggccaaccgagctgtaaacatgttagtaatgaggacaactagcatttgtacagggcttcacagtttacaaagcgctttctcatacattatcacatttgatcctcccagggccctgccaggttgttttgcatatgtgcattttaatttcaaaaagtcttccttccaagcgtgtatgatgaaatgagtaaattgattaattggcgtaacttattttgcatggatccaacctaatgttcatgcaggatagagaacatttccagaatacaaatttccaaacttaaaaaaaaaaaaaaaaaaaaaaaaaaaaaaaaaa

SEQ ID NO: 221 - RNA, 3638 nt, Homo sapiens
  source 1..3638: mol_type = other RNA
gatctccgcagccctccgggtttgaaaagagtgaagtatgcctccccggcccgcagcagccgcggcgtcccggcctggcccgagttctggagatgctgacttagtgctggcccgccgccttcctgcccacgagccccaaggccccactcctcgagggctccagtggcacctggcgccctcgggggacaggaagagcagccggccgggagcccgggcagtggctgagaagaaagccaaggtcattgcaggaatgaatgctgtggaagaaaaccaggggcccggggagtctcagaaggtggaggaggccagccctcctgctgtgcagcagcccactgaccccgcatcccccactgtggctaccacgcctgagcccgtggggtccgatgctggggacaagaatgccaccaaagcaggcgatgacgagccagagtacgaggacggccggggctttggcattggggagctggtgtgggggaaactgcggggcttctcctggtggccaggccgcattgtgtcttggtggatgacgggccggagccgagcagctgaaggcacccgctgggtcatgtggttcggagacggcaaattctcagtggtgtgtgttgagaagctgatgccgctgagctcgttttgcagtgcgttccaccaggccacgtacaacaagcagcccatgtaccgcaaagccatctacgaggtcctgcaggtggccagcagccgcgcggggaagctgttcccggtgtgccacgacagcgatgagagtgacactgccaaggccgtggaggtgcagaacaagcccatgattgaatgggccctggggggcttccagccttctggccctaagggcctggagccaccagaagaagagaagaatccctacaaagaagtgtacacggacatgtgggtggaacctgaggcagctgcctacgcaccacctccaccagccaaaaagccccggaagagcacagcggagaagcccaaggtcaaggagattattgatgagcgcacaagagagcggctggtgtacgaggtgcggcagaagtgccggaacattgaggacatctgcatctcctgtgggagcctcaatgttaccctggaacaccccctcttcgttggaggaatgtgccaaaactgcaagaactgctttctggagtgtgcgtaccagtacgacgacgacggctaccagtcctactgcaccatctgctgtgggggccgtgaggtgctcatgtgcggaaacaacaactgctgcaggtgcttttgcgtggagtgtgtggacctcttggtggggccgggggctgcccaggcagccattaaggaagacccctggaactgctacatgtgcgggcacaagggtacctacgggctgctgcggcggcgagaggactggccctcccggctccagatgttcttcgctaataaccacgaccaggaatttgaccctccaaaggtttacccacctgtcccagctgagaagaggaagcccatccgggtgctgtctctctttgatggaatcgctacagggctcctggtgctgaaggacttgggcattcaggtggaccgctacattgcctcggaggtgtgtgaggactccatcacggtgggcatggtgcggcaccaggggaagatcatgtacgtcggggacgtccgcagcgtcacacagaagcatatccaggagtggggcccattcgatctggtgattgggggcagtccctgcaatgacctctccatcgtcaaccctgctcgcaagggcctctacgagggcactggccggctcttctttgagttctaccgcctcctgcatgatgcgcggcccaaggagggagatgatcgccccttcttctggctctttgagaatgtggtggccatgggcgttagtgacaagagggacatctcgcgatttctcgagtccaaccctgtgatgattgatgccaaagaagtgtcagctgcacacagggcccgctacttctggggtaaccttcccggtatgaacaggccgttggcatccactgtgaatgataagctggagctgcaggagtgtctggagcatggcaggatagccaagttcagcaaagtgaggaccattactacgaggtcaaactccataaagcagggcaaagaccagcattttcctgtcttcatgaatgagaaagaggacatcttatggtgcactgaaatggaaagggtatttggtttcccagtccactatactgacgtctccaacatgagccgcttggcgaggcagagactgctgggccggtcatggagcgtgccagtcatccgccacctcttcgctccgctgaaggagtattttgcgtgtgtgtaagggacatgggggcaaactgaggtagcgacacaaagttaaacaaacaaacaaaaaacacaaaacataataaaacaccaagaacatgaggatggagagaagtatcagcacccagaagagaaaaaggaatttaaaacaaaaaccacagaggcggaaataccggagggctttgccttgcgaaaagggttggacatcatctcctgatttttcaatgttattcttcagtcctatttaaaaacaaaaccaagctcccttcccttcctcccccttcccttttttttcggtcagaccttttattttctactcttttcagaggggttttctgtttgtttgggttttgtttcttgctgtgactgaaacaagaaggttattgcagcaaaaatcagtaacaaaaaatagtaacaataccttgcagaggaaaggtgggagagaggaaaaaaggaaattctatagaaatctatatattgggttgtttttttttttgttttttgttttttttttttgggtttttttttttactatatatcttttttttgttgtctctagcctgatcagataggagcacaagcaggggacggaaagagagagacactcaggcggcagcattccctcccagccactgagctgtcgtgccagcaccattcctggtcacgcaaaacagaacccagttagcagcagggagacgagaacaccacacaagacatttttctacagtatttcaggtgcctaccacacaggaaaccttgaagaaaatcagtttctagaagccgctgttacctcttgtttacagtttatatatatatgatagatatgagatatatatataaaaggtactgttaactactgtacaacccgacttcataatggtgctttcaaacagcgagatgagtaaaaacatcagcttccacgttgccttctgcgcaaagggtttcaccaaggatggagaaagggagacagcttgcagatggcgcgttctcacggtgggctcttccccttggtttgtaacgaagtgaaggaggagaacttgggagccaggttctccctgccaaaaagggggctagatgaggtggtcgggcccgtggacagctgagagtgggattcatccagactcatgcaataaccctttgattgttttctaaaaggagactccctcggcaagatggcagagggtacggagtcttcaggcccagtttctcactttagccaattcgagggctccttgtggtgggatcagaactaatccagagtgtgggaaagtgacagtcaaaaccccacctggagcaaataaaaaaacatacaaaacgtactggtgctttcctgt

SEQ ID NO: 222 - RNA, 3608 nt, Homo sapiens
  source 1..3608: mol_type = other RNA
ccctccgcccccagccccatcgcccccttcccctcccccaagacgggcagctacttccagagcttcagggccgcggctcacacctgagcgcgactgcagaggggctgcacctggccttatggggatcctggagcgggttgtgagaaggaatgggcgcgtggatcgtagcctgaaagacgagtgtgatacggctgagaagaaagccaaggtcattgcaggaatgaatgctgtggaagaaaaccaggggcccggggagtctcagaaggtggaggaggccagccctcctgctgtgcagcagcccactgaccccgcatcccccactgtggctaccacgcctgagcccgtggggtccgatgctggggacaagaatgccaccaaagcaggcgatgacgagccagagtacgaggacggccggggctttggcattggggagctggtgtgggggaaactgcggggcttctcctggtggccaggccgcattgtgtcttggtggatgacgggccggagccgagcagctgaaggcacccgctgggtcatgtggttcggagacggcaaattctcagtggtgtgtgttgagaagctgatgccgctgagctcgttttgcagtgcgttccaccaggccacgtacaacaagcagcccatgtaccgcaaagccatctacgaggtcctgcaggtggccagcagccgcgcggggaagctgttcccggtgtgccacgacagcgatgagagtgacactgccaaggccgtggaggtgcagaacaagcccatgattgaatgggccctggggggcttccagccttctggccctaagggcctggagccaccagaagaagagaagaatccctacaaagaagtgtacacggacatgtgggtggaacctgaggcagctgcctacgcaccacctccaccagccaaaaagccccggaagagcacagcggagaagcccaaggtcaaggagattattgatgagcgcacaagagagcggctggtgtacgaggtgcggcagaagtgccggaacattgaggacatctgcatctcctgtgggagcctcaatgttaccctggaacaccccctcttcgttggaggaatgtgccaaaactgcaagaactgctttctggagtgtgcgtaccagtacgacgacgacggctaccagtcctactgcaccatctgctgtgggggccgtgaggtgctcatgtgcggaaacaacaactgctgcaggtgcttttgcgtggagtgtgtggacctcttggtggggccgggggctgcccaggcagccattaaggaagacccctggaactgctacatgtgcgggcacaagggtacctacgggctgctgcggcggcgagaggactggccctcccggctccagatgttcttcgctaataaccacgaccaggaatttgaccctccaaaggtttacccacctgtcccagctgagaagaggaagcccatccgggtgctgtctctctttgatggaatcgctacagggctcctggtgctgaaggacttgggcattcaggtggaccgctacattgcctcggaggtgtgtgaggactccatcacggtgggcatggtgcggcaccaggggaagatcatgtacgtcggggacgtccgcagcgtcacacagaagcatatccaggagtggggcccattcgatctggtgattgggggcagtccctgcaatgacctctccatcgtcaaccctgctcgcaagggcctctacgagggcactggccggctcttctttgagttctaccgcctcctgcatgatgcgcggcccaaggagggagatgatcgccccttcttctggctctttgagaatgtggtggccatgggcgttagtgacaagagggacatctcgcgatttctcgagtccaaccctgtgatgattgatgccaaagaagtgtcagctgcacacagggcccgctacttctggggtaaccttcccggtatgaacaggccgttggcatccactgtgaatgataagctggagctgcaggagtgtctggagcatggcaggatagccaagttcagcaaagtgaggaccattactacgaggtcaaactccataaagcagggcaaagaccagcattttcctgtcttcatgaatgagaaagaggacatcttatggtgcactgaaatggaaagggtatttggtttcccagtccactatactgacgtctccaacatgagccgcttggcgaggcagagactgctgggccggtcatggagcgtgccagtcatccgccacctcttcgctccgctgaaggagtattttgcgtgtgtgtaagggacatgggggcaaactgaggtagcgacacaaagttaaacaaacaaacaaaaaacacaaaacataataaaacaccaagaacatgaggatggagagaagtatcagcacccagaagagaaaaaggaatttaaaacaaaaaccacagaggcggaaataccggagggctttgccttgcgaaaagggttggacatcatctcctgatttttcaatgttattcttcagtcctatttaaaaacaaaaccaagctcccttcccttcctcccccttcccttttttttcggtcagaccttttattttctactcttttcagaggggttttctgtttgtttgggttttgtttcttgctgtgactgaaacaagaaggttattgcagcaaaaatcagtaacaaaaaatagtaacaataccttgcagaggaaaggtgggagagaggaaaaaaggaaattctatagaaatctatatattgggttgtttttttttttgttttttgttttttttttttgggtttttttttttactatatatcttttttttgttgtctctagcctgatcagataggagcacaagcaggggacggaaagagagagacactcaggcggcagcattccctcccagccactgagctgtcgtgccagcaccattcctggtcacgcaaaacagaacccagttagcagcagggagacgagaacaccacacaagacatttttctacagtatttcaggtgcctaccacacaggaaaccttgaagaaaatcagtttctagaagccgctgttacctcttgtttacagtttatatatatatgatagatatgagatatatatataaaaggtactgttaactactgtacaacccgacttcataatggtgctttcaaacagcgagatgagtaaaaacatcagcttccacgttgccttctgcgcaaagggtttcaccaaggatggagaaagggagacagcttgcagatggcgcgttctcacggtgggctcttccccttggtttgtaacgaagtgaaggaggagaacttgggagccaggttctccctgccaaaaagggggctagatgaggtggtcgggcccgtggacagctgagagtgggattcatccagactcatgcaataaccctttgattgttttctaaaaggagactccctcggcaagatggcagagggtacggagtcttcaggcccagtttctcactttagccaattcgagggctccttgtggtgggatcagaactaatccagagtgtgggaaagtgacagtcaaaaccccacctggagcaaataaaaaaacatacaaaacgtactggtgctttcctgt

SEQ ID NO: 223 - RNA, 3473 nt, Homo sapiens
  source 1..3473: mol_type = other RNA
acttccagagcttcagggccgcggctcacacctgagcgcgactgcagaggggctgcacctggccttatgggctgagaagaaagccaaggtcattgcaggaatgaatgctgtggaagaaaaccaggggcccggggagtctcagaaggtggaggaggccagccctcctgctgtgcagcagcccactgaccccgcatcccccactgtggctaccacgcctgagcccgtggggtccgatgctggggacaagaatgccaccaaagcaggcgatgacgagccagagtacgaggacggccggggctttggcattggggagctggtgtgggggaaactgcggggcttctcctggtggccaggccgcattgtgtcttggtggatgacgggccggagccgagcagctgaaggcacccgctgggtcatgtggttcggagacggcaaattctcagtggtgtgtgttgagaagctgatgccgctgagctcgttttgcagtgcgttccaccaggccacgtacaacaagcagcccatgtaccgcaaagccatctacgaggtcctgcaggtggccagcagccgcgcggggaagctgttcccggtgtgccacgacagcgatgagagtgacactgccaaggccgtggaggtgcagaacaagcccatgattgaatgggccctggggggcttccagccttctggccctaagggcctggagccaccagaagaagagaagaatccctacaaagaagtgtacacggacatgtgggtggaacctgaggcagctgcctacgcaccacctccaccagccaaaaagccccggaagagcacagcggagaagcccaaggtcaaggagattattgatgagcgcacaagagagcggctggtgtacgaggtgcggcagaagtgccggaacattgaggacatctgcatctcctgtgggagcctcaatgttaccctggaacaccccctcttcgttggaggaatgtgccaaaactgcaagaactgctttctggagtgtgcgtaccagtacgacgacgacggctaccagtcctactgcaccatctgctgtgggggccgtgaggtgctcatgtgcggaaacaacaactgctgcaggtgcttttgcgtggagtgtgtggacctcttggtggggccgggggctgcccaggcagccattaaggaagacccctggaactgctacatgtgcgggcacaagggtacctacgggctgctgcggcggcgagaggactggccctcccggctccagatgttcttcgctaataaccacgaccaggaatttgaccctccaaaggtttacccacctgtcccagctgagaagaggaagcccatccgggtgctgtctctctttgatggaatcgctacagggctcctggtgctgaaggacttgggcattcaggtggaccgctacattgcctcggaggtgtgtgaggactccatcacggtgggcatggtgcggcaccaggggaagatcatgtacgtcggggacgtccgcagcgtcacacagaagcatatccaggagtggggcccattcgatctggtgattgggggcagtccctgcaatgacctctccatcgtcaaccctgctcgcaagggcctctacgagggcactggccggctcttctttgagttctaccgcctcctgcatgatgcgcggcccaaggagggagatgatcgccccttcttctggctctttgagaatgtggtggccatgggcgttagtgacaagagggacatctcgcgatttctcgagtccaaccctgtgatgattgatgccaaagaagtgtcagctgcacacagggcccgctacttctggggtaaccttcccggtatgaacaggccgttggcatccactgtgaatgataagctggagctgcaggagtgtctggagcatggcaggatagccaagttcagcaaagtgaggaccattactacgaggtcaaactccataaagcagggcaaagaccagcattttcctgtcttcatgaatgagaaagaggacatcttatggtgcactgaaatggaaagggtatttggtttcccagtccactatactgacgtctccaacatgagccgcttggcgaggcagagactgctgggccggtcatggagcgtgccagtcatccgccacctcttcgctccgctgaaggagtattttgcgtgtgtgtaagggacatgggggcaaactgaggtagcgacacaaagttaaacaaacaaacaaaaaacacaaaacataataaaacaccaagaacatgaggatggagagaagtatcagcacccagaagagaaaaaggaatttaaaacaaaaaccacagaggcggaaataccggagggctttgccttgcgaaaagggttggacatcatctcctgatttttcaatgttattcttcagtcctatttaaaaacaaaaccaagctcccttcccttcctcccccttcccttttttttcggtcagaccttttattttctactcttttcagaggggttttctgtttgtttgggttttgtttcttgctgtgactgaaacaagaaggttattgcagcaaaaatcagtaacaaaaaatagtaacaataccttgcagaggaaaggtgggagagaggaaaaaaggaaattctatagaaatctatatattgggttgtttttttttttgttttttgttttttttttttgggtttttttttttactatatatcttttttttgttgtctctagcctgatcagataggagcacaagcaggggacggaaagagagagacactcaggcggcagcattccctcccagccactgagctgtcgtgccagcaccattcctggtcacgcaaaacagaacccagttagcagcagggagacgagaacaccacacaagacatttttctacagtatttcaggtgcctaccacacaggaaaccttgaagaaaatcagtttctagaagccgctgttacctcttgtttacagtttatatatatatgatagatatgagatatatatataaaaggtactgttaactactgtacaacccgacttcataatggtgctttcaaacagcgagatgagtaaaaacatcagcttccacgttgccttctgcgcaaagggtttcaccaaggatggagaaagggagacagcttgcagatggcgcgttctcacggtgggctcttccccttggtttgtaacgaagtgaaggaggagaacttgggagccaggttctccctgccaaaaagggggctagatgaggtggtcgggcccgtggacagctgagagtgggattcatccagactcatgcaataaccctttgattgttttctaaaaggagactccctcggcaagatggcagagggtacggagtcttcaggcccagtttctcactttagccaattcgagggctccttgtggtgggatcagaactaatccagagtgtgggaaagtgacagtcaaaaccccacctggagcaaataaaaaaacatacaaaacgta

SEQ ID NO: 224 - RNA, 4294 nt, Homo sapiens
  source 1..4294: mol_type = other RNA
gacgcggcgccgcggcaccagggcgcgcagccgggccggcccgaccccaccggccatacggtggagccatcgaagcccccacccacaggctgacagaggcaccgttcaccagagggctcaacaccgggatctatgtttaagttttaactctcgcctccaaagaccacgataattccttccccaaagcccagcagccccccagccccgcgcagccccagcctgcctcccggcgcccagatgcccgccatgccctccagcggccccggggacaccagcagctctgctgcggagcgggaggaggaccgaaaggacggagaggagcaggaggagccgcgtggcaaggaggagcgccaagagcccagcaccacggcacggaaggtggggcggcctgggaggaagcgcaagcaccccccggtggaaagcggtgacacgccaaaggaccctgcggtgatctccaagtccccatccatggcccaggactcaggcgcctcagagctattacccaatggggacttggagaagcggagtgagccccagccagaggaggggagccctgctggggggcagaagggcggggccccagcagagggagagggtgcagctgagaccctgcctgaagcctcaagagcagtggaaaatggctgctgcacccccaaggagggccgaggagcccctgcagaagcgggcaaagaacagaaggagaccaacatcgaatccatgaaaatggagggctcccggggccggctgcggggtggcttgggctgggagtccagcctccgtcagcggcccatgccgaggctcaccttccaggcgggggacccctactacatcagcaagcgcaagcgggacgagtggctggcacgctggaaaagggaggctgagaagaaagccaaggtcattgcaggaatgaatgctgtggaagaaaaccaggggcccggggagtctcagaaggtggaggaggccagccctcctgctgtgcagcagcccactgaccccgcatcccccactgtggctaccacgcctgagcccgtggggtccgatgctggggacaagaatgccaccaaagcaggcgatgacgagccagagtacgaggacggccggggctttggcattggggagctggtgtgggggaaactgcggggcttctcctggtggccaggccgcattgtgtcttggtggatgacgggccggagccgagcagctgaaggcacccgctgggtcatgtggttcggagacggcaaattctcagtggtgtgtgttgagaagctgatgccgctgagctcgttttgcagtgcgttccaccaggccacgtacaacaagcagcccatgtaccgcaaagccatctacgaggtcctgcaggtggccagcagccgcgcggggaagctgttcccggtgtgccacgacagcgatgagagtgacactgccaaggccgtggaggtgcagaacaagcccatgattgaatgggccctggggggcttccagccttctggccctaagggcctggagccaccagaagaagagaagaatccctacaaagaagtgtacacggacatgtgggtggaacctgaggcagctgcctacgcaccacctccaccagccaaaaagccccggaagagcacagcggagaagcccaaggtcaaggagattattgatgagcgcacaagagagcggctggtgtacgaggtgcggcagaagtgccggaacattgaggacatctgcatctcctgtgggagcctcaatgttaccctggaacaccccctcttcgttggaggaatgtgccaaaactgcaagaactgctttctggagtgtgcgtaccagtacgacgacgacggctaccagtcctactgcaccatctgctgtgggggccgtgaggtgctcatgtgcggaaacaacaactgctgcaggtgcttttgcgtggagtgtgtggacctcttggtggggccgggggctgcccaggcagccattaaggaagacccctggaactgctacatgtgcgggcacaagggtacctacgggctgctgcggcggcgagaggactggccctcccggctccagatgttcttcgctaataaccacgaccaggaatttgaccctccaaaggtttacccacctgtcccagctgagaagaggaagcccatccgggtgctgtctctctttgatggaatcgctacagggctcctggtgctgaaggacttgggcattcaggtggaccgctacattgcctcggaggtgtgtgaggactccatcacggtgggcatggtgcggcaccaggggaagatcatgtacgtcggggacgtccgcagcgtcacacagaagcatatccaggagtggggcccattcgatctggtgattgggggcagtccctgcaatgacctctccatcgtcaaccctgctcgcaagggcctctacgagggcactggccggctcttctttgagttctaccgcctcctgcatgatgcgcggcccaaggagggagatgatcgccccttcttctggctctttgagaatgtggtggccatgggcgttagtgacaagagggacatctcgcgatttctcgagtccaaccctgtgatgattgatgccaaagaagtgtcagctgcacacagggcccgctacttctggggtaaccttcccggtatgaacaggccgttggcatccactgtgaatgataagctggagctgcaggagtgtctggagcatggcaggatagccaagttcagcaaagtgaggaccattactacgaggtcaaactccataaagcagggcaaagaccagcattttcctgtcttcatgaatgagaaagaggacatcttatggtgcactgaaatggaaagggtatttggtttcccagtccactatactgacgtctccaacatgagccgcttggcgaggcagagactgctgggccggtcatggagcgtgccagtcatccgccacctcttcgctccgctgaaggagtattttgcgtgtgtgtaagggacatgggggcaaactgaggtagcgacacaaagttaaacaaacaaacaaaaaacacaaaacataataaaacaccaagaacatgaggatggagagaagtatcagcacccagaagagaaaaaggaatttaaaacaaaaaccacagaggcggaaataccggagggctttgccttgcgaaaagggttggacatcatctcctgatttttcaatgttattcttcagtcctatttaaaaacaaaaccaagctcccttcccttcctcccccttcccttttttttcggtcagaccttttattttctactcttttcagaggggttttctgtttgtttgggttttgtttcttgctgtgactgaaacaagaaggttattgcagcaaaaatcagtaacaaaaaatagtaacaataccttgcagaggaaaggtgggagagaggaaaaaaaggaaattctatagaaatctatatattgggttgtttttttttttgttttttgtttttttttttgggtttttttttttactatatatcttttttttgttgtctctagcctgatcagataggagcacaagcaggggacggaaagagagagacactcaggcggcagcattccctcccagccactgagctgtcgtgccagcaccattcctggtcacgcaaaacagaacccagttagcagcagggagacgagaacaccacacaagacatttttctacagtatttcaggtgcctaccacacaggaaaccttgaagaaaatcagtttctagaagccgctgttacctcttgtttacagtttatatatatatgatagatatgagatatatatataaaaggtactgttaactactgtacaacccgacttcataatggtgctttcaaacagcgagatgagtaaaaacatcagcttccacgttgccttctgcgcaaagggtttcaccaaggatggagaaagggagacagcttgcagatggcgcgttctcacggtgggctcttccccttggtttgtaacgaagtgaaggaggagaacttgggagccaggttctccctgccaaaaagggggctagatgaggtggtcgggcccgtggacagctgagagtgggattcatccagactcatgcaataaccctttgattgttttctaaaaggagactccctcggcaagatggcagagggtacggagtcttcaggcccagtttctcactttagccaattcgagggctccttgtggtgggatcagaactaatccagagtgtgggaaagtgacagtcaaaaccccacctggagcaaataaaaaaacatacaaaacgtaaaaaaaaaaaaaaaa

SEQ ID NO: 225 - RNA, 4258 nt, Homo sapiens
  source 1..4258: mol_type = other RNA
cagtgctggatgcggggacccagcgcagaagcagcgccaggtggagccatcgaagcccccacccacaggctgacagaggcaccgttcaccagagggctcaacaccgggatctatgtttaagttttaactctcgcctccaaagaccacgataattccttccccaaagcccagcagccccccagccccgcgcagccccagcctgcctcccggcgcccagatgcccgccatgccctccagcggccccggggacaccagcagctctgctgcggagcgggaggaggaccgaaaggacggagaggagcaggaggagccgcgtggcaaggaggagcgccaagagcccagcaccacggcacggaaggtggggcggcctgggaggaagcgcaagcaccccccggtggaaagcggtgacacgccaaaggaccctgcggtgatctccaagtccccatccatggcccaggactcaggcgcctcagagctattacccaatggggacttggagaagcggagtgagccccagccagaggaggggagccctgctggggggcagaagggcggggccccagcagagggagagggtgcagctgagaccctgcctgaagcctcaagagcagtggaaaatggctgctgcacccccaaggagggccgaggagcccctgcagaagcgggcaaagaacagaaggagaccaacatcgaatccatgaaaatggagggctcccggggccggctgcggggtggcttgggctgggagtccagcctccgtcagcggcccatgccgaggctcaccttccaggcgggggacccctactacatcagcaagcgcaagcgggacgagtggctggcacgctggaaaagggaggctgagaagaaagccaaggtcattgcaggaatgaatgctgtggaagaaaaccaggggcccggggagtctcagaaggtggaggaggccagccctcctgctgtgcagcagcccactgaccccgcatcccccactgtggctaccacgcctgagcccgtggggtccgatgctggggacaagaatgccaccaaagcaggcgatgacgagccagagtacgaggacggccggggctttggcattggggagctggtgtgggggaaactgcggggcttctcctggtggccaggccgcattgtgtcttggtggatgacgggccggagccgagcagctgaaggcacccgctgggtcatgtggttcggagacggcaaattctcagtggtgtgtgttgagaagctgatgccgctgagctcgttttgcagtgcgttccaccaggccacgtacaacaagcagcccatgtaccgcaaagccatctacgaggtcctgcaggtggccagcagccgcgcggggaagctgttcccggtgtgccacgacagcgatgagagtgacactgccaaggccgtggaggtgcagaacaagcccatgattgaatgggccctggggggcttccagccttctggccctaagggcctggagccaccagaagaagagaagaatccctacaaagaagtgtacacggacatgtgggtggaacctgaggcagctgcctacgcaccacctccaccagccaaaaagccccggaagagcacagcggagaagcccaaggtcaaggagattattgatgagcgcacaagagagcggctggtgtacgaggtgcggcagaagtgccggaacattgaggacatctgcatctcctgtgggagcctcaatgttaccctggaacaccccctcttcgttggaggaatgtgccaaaactgcaagaactgctttctggagtgtgcgtaccagtacgacgacgacggctaccagtcctactgcaccatctgctgtgggggccgtgaggtgctcatgtgcggaaacaacaactgctgcaggtgcttttgcgtggagtgtgtggacctcttggtggggccgggggctgcccaggcagccattaaggaagacccctggaactgctacatgtgcgggcacaagggtacctacgggctgctgcggcggcgagaggactggccctcccggctccagatgttcttcgctaataaccacgaccaggaatttgaccctccaaaggtttacccacctgtcccagctgagaagaggaagcccatccgggtgctgtctctctttgatggaatcgctacagggctcctggtgctgaaggacttgggcattcaggtggaccgctacattgcctcggaggtgtgtgaggactccatcacggtgggcatggtgcggcaccaggggaagatcatgtacgtcggggacgtccgcagcgtcacacagaagcatatccaggagtggggcccattcgatctggtgattgggggcagtccctgcaatgacctctccatcgtcaaccctgctcgcaagggcctctacgagggcactggccggctcttctttgagttctaccgcctcctgcatgatgcgcggcccaaggagggagatgatcgccccttcttctggctctttgagaatgtggtggccatgggcgttagtgacaagagggacatctcgcgatttctcgagtccaaccctgtgatgattgatgccaaagaagtgtcagctgcacacagggcccgctacttctggggtaaccttcccggtatgaacaggccgttggcatccactgtgaatgataagctggagctgcaggagtgtctggagcatggcaggatagccaagttcagcaaagtgaggaccattactacgaggtcaaactccataaagcagggcaaagaccagcattttcctgtcttcatgaatgagaaagaggacatcttatggtgcactgaaatggaaagggtatttggtttcccagtccactatactgacgtctccaacatgagccgcttggcgaggcagagactgctgggccggtcatggagcgtgccagtcatccgccacctcttcgctccgctgaaggagtattttgcgtgtgtgtaagggacatgggggcaaactgaggtagcgacacaaagttaaacaaacaaacaaaaaacacaaaacataataaaacaccaagaacatgaggatggagagaagtatcagcacccagaagagaaaaaggaatttaaaacaaaaaccacagaggcggaaataccggagggctttgccttgcgaaaagggttggacatcatctcctgatttttcaatgttattcttcagtcctatttaaaaacaaaaccaagctcccttcccttcctcccccttcccttttttttcggtcagaccttttattttctactcttttcagaggggttttctgtttgtttgggttttgtttcttgctgtgactgaaacaagaaggttattgcagcaaaaatcagtaacaaaaaatagtaacaataccttgcagaggaaaggtgggagagaggaaaaaaggaaattctatagaaatctatatattgggttgtttttttttttgttttttgttttttttttttgggtttttttttttactatatatcttttttttgttgtctctagcctgatcagataggagcacaagcaggggacggaaagagagagacactcaggcggcagcattccctcccagccactgagctgtcgtgccagcaccattcctggtcacgcaaaacagaacccagttagcagcagggagacgagaacaccacacaagacatttttctacagtatttcaggtgcctaccacacaggaaaccttgaagaaaatcagtttctagaagccgctgttacctcttgtttacagtttatatatatatgatagatatgagatatatatataaaaggtactgttaactactgtacaacccgacttcataatggtgctttcaaacagcgagatgagtaaaaacatcagcttccacgttgccttctgcgcaaagggtttcaccaaggatggagaaagggagacagcttgcagatggcgcgttctcacggtgggctcttccccttggtttgtaacgaagtgaaggaggagaacttgggagccaggttctccctgccaaaaagggggctagatgaggtggtcgggcccgtggacagctgagagtgggattcatccagactcatgcaataaccctttgattgttttctaaaaggagactccctcggcaagatggcagagggtacggagtcttcaggcccagtttctcactttagccaattcgagggctccttgtggtgggatcagaactaatccagagtgtgggaaagtgacagtcaaaaccccacctggagcaaataaaaaaacatacaaaacgt

SEQ ID NO: 226 - RNA, 4476 nt, Homo sapiens
  source 1..4476: mol_type = other RNA
ggggccgctgtccctgcggccagtgctggatgcggggacccagcgcagaagcagcgccaggtggagccatcgaagcccccacccacaggctgacagaggcaccgttcaccagagggctcaacaccgggatctatgtttaagttttaactctcgcctccaaagaccacgataattccttccccaaagcccagcagccccccagccccgcgcagccccagcctgcctcccggcgcccagatgcccgccatgccctccagcggccccggggacaccagcagctctgctgcggagcgggaggaggaccgaaaggacggagaggagcaggaggagccgcgtggcaaggaggagcgccaagagcccagcaccacggcacggaaggtggggcggcctgggaggaagcgcaagcaccccccggtggaaagcggtgacacgccaaaggaccctgcggtgatctccaagtccccatccatggcccaggactcaggcgcctcagagctattacccaatggggacttggagaagcggagtgagccccagccagaggaggggagccctgctggggggcagaagggcggggccccagcagagggagagggtgcagctgagaccctgcctgaagcctcaagagcagtggaaaatggctgctgcacccccaaggagggccgaggagcccctgcagaagcgggcaaagaacagaaggagaccaacatcgaatccatgaaaatggagggctcccggggccggctgcggggtggcttgggctgggagtccagcctccgtcagcggcccatgccgaggctcaccttccaggcgggggacccctactacatcagcaagcgcaagcgggacgagtggctggcacgctggaaaagggaggctgagaagaaagccaaggtcattgcaggaatgaatgctgtggaagaaaaccaggggcccggggagtctcagaaggtggaggaggccagccctcctgctgtgcagcagcccactgaccccgcatcccccactgtggctaccacgcctgagcccgtggggtccgatgctggggacaagaatgccaccaaagcaggcgatgacgagccagagtacgaggacggccggggctttggcattggggagctggtgtgggggaaactgcggggcttctcctggtggccaggccgcattgtgtcttggtggatgacgggccggagccgagcagctgaaggcacccgctgggtcatgtggttcggagacggcaaattctcagtggtgtgtgttgagaagctgatgccgctgagctcgttttgcagtgcgttccaccaggccacgtacaacaagcagcccatgtaccgcaaagccatctacgaggtcctgcaggtggccagcagccgcgcggggaagctgttcccggtgtgccacgacagcgatgagagtgacactgccaaggccgtggaggtgcagaacaagcccatgattgaatgggccctggggggcttccagccttctggccctaagggcctggagccaccagaagaagagaagaatccctacaaagaagtgtacacggacatgtgggtggaacctgaggcagctgcctacgcaccacctccaccagccaaaaagccccggaagagcacagcggagaagcccaaggtcaaggagattattgatgagcgcacaagagagcggctggtgtacgaggtgcggcagaagtgccggaacattgaggacatctgcatctcctgtgggagcctcaatgttaccctggaacaccccctcttcgttggaggaatgtgccaaaactgcaagaactgctttctggagtgtgcgtaccagtacgacgacgacggctaccagtcctactgcaccatctgctgtgggggccgtgaggtgctcatgtgcggaaacaacaactgctgcaggtgcttttgcgtggagtgtgtggacctcttggtggggccgggggctgcccaggcagccattaaggaagacccctggaactgctacatgtgcgggcacaagggtacctacgggctgctgcggcggcgagaggactggccctcccggctccagatgttcttcgctaataaccacgaccaggaatttgaccctccaaaggtttacccacctgtcccagctgagaagaggaagcccatccgggtgctgtctctctttgatggaatcgctacagggctcctggtgctgaaggacttgggcattcaggtggaccgctacattgcctcggaggtgtgtgaggactccatcacggtgggcatggtgcggcaccaggggaagatcatgtacgtcggggacgtccgcagcgtcacacagaagcatatccaggagtggggcccattcgatctggtgattgggggcagtccctgcaatgacctctccatcgtcaaccctgctcgcaagggcctctacgagggcactggccggctcttctttgagttctaccgcctcctgcatgatgcgcggcccaaggagggagatgatcgccccttcttctggctctttgagaatgtggtggccatgggcgttagtgacaagagggacatctcgcgatttctcgaggtacaaaatagccacctgtactagtgggctagtggccactgaattgaacagtgtagaggacaacccaccatcgcagaagttcatttggacaatgctgatctagaacgttccagtgacagcttgtggaatgtggctaggtgtaattccagcttctcctggaggctgcaggctagcccagtgtgtggctcctgagagagaatccaaccctgtgatgattgatgccaaagaagtgtcagctgcacacagggcccgctacttctggggtaaccttcccggtatgaacaggccgttggcatccactgtgaatgataagctggagctgcaggagtgtctggagcatggcaggatagccaagttcagcaaagtgaggaccattactacgaggtcaaactccataaagcagggcaaagaccagcattttcctgtcttcatgaatgagaaagaggacatcttatggtgcactgaaatggaaagggtatttggtttcccagtccactatactgacgtctccaacatgagccgcttggcgaggcagagactgctgggccggtcatggagcgtgccagtcatccgccacctcttcgctccgctgaaggagtattttgcgtgtgtgtaagggacatgggggcaaactgaggtagcgacacaaagttaaacaaacaaacaaaaaacacaaaacataataaaacaccaagaacatgaggatggagagaagtatcagcacccagaagagaaaaaggaatttaaaacaaaaaccacagaggcggaaataccggagggctttgccttgcgaaaagggttggacatcatctcctgatttttcaatgttattcttcagtcctatttaaaaacaaaaccaagctcccttcccttcctcccccttcccttttttttcggtcagaccttttattttctactcttttcagaggggttttctgtttgtttgggttttgtttcttgctgtgactgaaacaagaaggttattgcagcaaaaatcagtaacaaaaaatagtaacaataccttgcagaggaaaggtgggagagaggaaaaaaggaaattctatagaaatctatatattgggttgtttttttttttgttttttgtttttttttttgggtttttttttttactatatatcttttttttgttgtctctagcctgatcagataggagcacaagcaggggacggaaagagagagacactcaggcggcagcattccctcccagccactgagctgtcgtgccagcaccattcctggtcacgcaaaacagaacccagttagcagcagggagacgagaacaccacacaagacatttttctacagtatttcaggtgcctaccacacaggaaaccttgaagaaaatcagtttctagaagccgctgttacctcttgtttacagtttatatatatatgatagatatgagatatatatataaaaggtactgttaactactgtacaacccgacttcataatggtgctttcaaacagcgagatgagtaaaaacatcagcttccacgttgccttctgcgcaaagggtttcaccaaggatggagaaagggagacagcttgcagatggcgcgttctcacggtgggctcttccccttggtttgtaacgaagtgaaggaggagaacttgggagccaggttctccctgccaaaaagggggctagatgaggtggtcgggcccgtggacagctgagagtgggattcatccagactcatgcaataaccctttgattgttttctaaaaggagactccctcggcaagatggcagagggtacggagtcttcaggcccagtttctcactttagccaattcgagggctccttgtggtgggatcagaactaatccagagtgtgggaaagtgacagtcaaaaccccacctggagcaaataaaaaaacatacaaaacgt

SEQ ID NO: 227 - RNA, 1758 nt, Homo sapiens
  source 1..1758: mol_type = other RNA
agctgagaagaggaagcccatccgggtgctgtctctctttgatggaatcgctacagggctcctggtgctgaaggacttgggcattcaggtggaccgctacattgcctcggaggtgtgtgaggactccatcacggtgggcatggtgcggcaccaggggaagatcatgtacgtcggggacgtccgcagcgtcacacagaagcatatccaggagtggggcccattcgatctggtgattgggggcagtccctgcaatgacctctccatcgtcaaccctgctcgcaagggcctctacgagggcactggccggctcttctttgagttctaccgcctcctgcatgatgcgcggcccaaggagggagatgatcgccccttcttctggctctttgagaatgtggtggccatgggcgttagtgacaagagggacatctcgcgatttctcgagtccaaccctgtgatgattgatgccaaagaagtgtcagctgcacacagggcccgctacttctggggtaaccttcccggtatgaacaggccgttggcatccactgtgaatgataagctggagctgcaggagtgtctggagcatggcaggatagccaagttcagcaaagtgaggaccattactacgaggtcaaactccataaagcagggcaaagaccagcattttcctgtcttcatgaatgagaaagaggacatcttatggtgcactgaaatggaaagggtatttggtttcccagtccactatactgacgtctccaacatgagccgcttggcgaggcagagactgctgggccggtcatggagcgtgccagtcatccgccacctcttcgctccgctgaaggagtattttgcgtgtgtgtaagggacatgggggcaaactgaggtagcgacacaaagttaaacaaacaaacaaaaaacacaaaacataataaaacaccaagaacatgaggatggagagaagtatcagcacccagaagagaaaaaggaatttaaaacaaaaaccacagaggcggaaataccggagggctttgccttgcgaaaagggttggacatcatctcctgatttttcaatgttattcttcagtcctatttaaaaacaaaaccaagctcccttcccttcctcccccttcccttttttttcggtcagaccttttattttctactcttttcagaggggttttctgtttgtttgggttttgtttcttgctgtgactgaaacaagaaggttattgcagcaaaaatcagtaacaaaaaatagtaacaataccttgcagaggaaaggtgggagagaggaaaaaaggaaattctatagaaatctatatattgggttgtttttttttttgttttttgttttttttttttgggtttttttttttactatatatcttttttttgttgtctctagcctgatcagataggagcacaagcaggggacggaaagagagagacactcaggcggcagcattccctcccagccactgagctgtcgtgccagcaccattcctggtcacgcaaaacagaacccagttagcagcagggagacgagaacaccacacaagacatttttctacagtatttcaggtgcctaccacacaggaaaccttgaagaaaatcagtttctagaagccgctgttacctcttgtttacagtttatatatatatgatagatatgagatatatatataaaaggtactgttaactactgtaaaaaaaaaaaaaaaaaaaaaaaaaaaaaaaaaaaaaaaaaaaaaaaaaaaaaaa

SEQ ID NO: 228 - RNA, 2371 nt, Homo sapiens
  source 1..2371: mol_type = other RNA
ccgcccccagccccatcgcccccttcccctcccccaagacgggcagctacttccagagcttcagggccgcggctcacacctgagcgcgactgcagaggggctgcacctggccttatggggatcctggagcgggttgtgagaaggaatgggcgcgtggatcgtagcctgaaagacgagtgtgatacggctgagaagaaagccaaggtcattgcaggaatgaatgctgtggaagaaaaccaggggcccggggagtctcagaaggtggaggaggccagccctcctgctgtgcagcagcccactgaccccgcatcccccactgtggctaccacgcctgagcccgtggggtccgatgctggggacaagaatgccaccaaagcaggcgatgacgagccagagtacgaggacggccggggctttggcattggggagctggtgtgggggaaactgcggggcttctcctggtggccaggccgcattgtgtcttggtggatgacgggccggagccgagcagctgaaggcacccgctgggtcatgtggttcggagacggcaaattctcagtggtgtgtgttgagaagctgatgccgctgagctcgttttgcagtgcgttccaccaggccacgtacaacaagcagcccatgtaccgcaaagccatctacgaggtcctgcaggtggccagcagccgcgcggggaagctgttcccggtgtgccacgacagcgatgagagtgacactgccaaggccgtggaggtgcagaacaagcccatgattgaatgggccctggggggcttccagccttctggccctaagggcctggagccaccagaagaagagaagaatccctacaaagaagtgtacacggacatgtgggtggaacctgaggcagctgcctacgcaccacctccaccagccaaaaagccccggaagagcacagcggagaagcccaaggtcaaggagattattgatgagcgcacaagagagcggctggtgtacgaggtgcggcagaagtgccggaacattgaggacatctgcatctcctgtgggagcctcaatgttaccctggaacaccccctcttcgttggaggaatgtgccaaaactgcaagaactgctttctggagtgtgcgtaccagtacgacgacgacggctaccagtcctactgcaccatctgctgtgggggccgtgaggtgctcatgtgcggaaacaacaactgctgcaggtgcttttgcgtggagtgtgtggacctcttggtggggccgggggctgcccaggcagccattaaggaagacccctggaactgctacatgtgcgggcacaagggtacctacgggctgctgcggcggcgagaggactggccctcccggctccagatgttcttcgctaataaccacgaccaggaatttgaccctccaaaggtttacccacctgtcccagctgagaagaggaagcccatccgggtgctgtctctctttgatggaatcgctacagggctcctggtgctgaaggacttgggcattcaggtggaccgctacattgcctcggaggtgtgtgaggactccatcacggtgggcatggtgcggcaccaggggaagatcatgtacgtcggggacgtccgcagcgtcacacagaagcatatccaggagtggggcccattcgatctggtgattgggggcagtccctgcaatgacctctccatcgtcaaccctgctcgcaagggcctctacgagggcactggccggctcttctttgagttctaccgcctcctgcatgatgcgcggcccaaggagggagatgatcgccccttcttctggctctttgagaatgtggtggccatgggcgttagtgacaagagggacatctcgcgatttctcgagtccaaccctgtgatgattgatgccaaagaagtgtcagctgcacacagggcccgctacttctggggtaaccttcccggtatgaacaggccgttggcatccactgtgaatgataagctggagctgcaggagtgtctggagcatggcaggatagccaagttcagcaaagtgaggaccattactacgaggtcaaactccataaagcagggcaaagaccagcattttcctgtcttcatgaatgagaaagaggacatcttatggtgcactgaaatggaaagggtatttggtttcccagtccactatactgacgtctccaacatgagccgcttggcgaggcagagactgctgggccggtcatggagcgtgccagtcatccgccacctcttcgctccgctgaaggagtattttgcgtgtgtgtaagggacatgggggcaaactgaggtagcgacacaaagttaaacaaacaaacaaaaaacacaaaacataataaaacaccaagaacatg

SEQ ID NO: 229 - RNA, 1113 nt, Homo sapiens
  source 1..1113: mol_type = other RNA
agtgtgtggacctcttggtggggccgggggctgcccaggcagccattaaggaagacccctggaactgctacatgtgcgggcacaagggtacctacgggctgctgcggcggcgagaggactggccctcccggctccagatgttcttcgctaataaccacgaccaggaatttgaccctccaaaggtttacccacctgtcccagctgagaagaggaagcccatccgggtgctgtctctctttgatggaatcgctacagggctcctggtgctgaaggacttgggcattcaggtggaccgctacattgcctcggaggtgtgtgaggactccatcacggtgggcatggtgcggcaccaggggaagatcatgtacgtcggggacgtccgcagcgtcacacagaagcatatccaggagtggggcccattcgatctggtgattgggggcagtccctgcaatgacctctccatcgtcaaccctgctcgcaagggcctctacgagggcactggccggctcttctttgagttctaccgcctcctgcatgatgcgcggcccaaggagggagatgatcgccccttcttctggctctttgagaatgtggtggccatgggcgttagtgacaagagggacatctcgcgatttctcgagtccaaccctgtgatgattgatgccaaagaagtgtcagctgcacacagggcccgctacttctggggtaaccttcccggtatgaacaggccgttggcatccactgtgaatgataagctggagctgcaggagtgtctggagcatggcaggatagccaagttcagcaaagtgaggaccattactacgaggtcaaactccataaagcagggcaaagaccagcattttcctgtcttcatgaatgagaaagaggacatcttatggtgcactgaaatggaaagggtatttggtttcccagtccactatactgacgtctccaacatgagccgcttggcgaggcagagactgctgggccggtcatggagcgtgccagtcatccgccacctcttcgctccgctgaaggagtattttgcgtgtgtgtaagggacatgggggcaaactgaggtagcgacacaaagttaaaaaaaaaaaacaaaaa

SEQ ID NO: 230 - RNA, 3005 nt, Homo sapiens
  source 1..3005: mol_type = other RNA
gccgcggcaccagggcgcgcagccgggccggcccgaccccaccggccatacggtggagccatcgaagcccccacccacaggctgacagaggcaccgttcaccagagggctcaacaccgggatctatgtttaagttttaactctcgcctccaaagaccacgataattccttccccaaagcccagcagccccccagccccgcgcagccccagcctgcctcccggcgcccagatgcccgccatgccctccagcggccccggggacaccagcagctctgctgcggagcgggaggaggaccgaaaggacggagaggagcaggaggagccgcgtggcaaggaggagcgccaagagcccagcaccacggcacggaaggtggggcggcctgggaggaagcgcaagcaccccccggtggaaagcggtgacacgccaaaggaccctgcggtgatctccaagtccccatccatggcccaggactcaggcgcctcagagctattacccaatggggacttggagaagcggagtgagccccagccagaggaggggagccctgctggggggcagaagggcggggccccagcagagggagagggtgcagctgagaccctgcctgaagcctcaagagcagtggaaaatggctgctgcacccccaaggagggccgaggagcccctgcagaagcgggcaaagaacagaaggagaccaacatcgaatccatgaaaatggagggctcccggggccggctgcggggtggcttgggctgggagtccagcctccgtcagcggcccatgccgaggctcaccttccaggcgggggacccctactacatcagcaagcgcaagcgggacgagtggctggcacgctggaaaagggaggctgagaagaaagccaaggtcattgcaggaatgaatgctgtggaagaaaaccaggggcccggggagtctcagaaggtggaggaggccagccctcctgctgtgcagcagcccactgaccccgcatcccccactgtggctaccacgcctgagcccgtggggtccgatgctggggacaagaatgccaccaaagcaggcgatgacgagccagagtacgaggacggccggggctttggcattggggagctggtgtgggggaaactgcggggcttctcctggtggccaggccgcattgtgtcttggtggatgacgggccggagccgagcagctgaaggcacccgctgggtcatgtggttcggagacggcaaattctcagtggtgtgtgttgagaagctgatgccgctgagctcgttttgcagtgcgttccaccaggccacgtacaacaagcagcccatgtaccgcaaagccatctacgaggtcctgcaggtggccagcagccgcgcggggaagctgttcccggtgtgccacgacagcgatgagagtgacactgccaaggccgtggaggtgcagaacaagcccatgattgaatgggccctggggggcttccagccttctggccctaagggcctggagccaccagaagaagagaagaatccctacaaagaagtgtacacggacatgtgggtggaacctgaggcagctgcctacgcaccacctccaccagccaaaaagccccggaagagcacagcggagaagcccaaggtcaaggagattattgatgagcgcacaagagagcggctggtgtacgaggtgcggcagaagtgccggaacattgaggacatctgcatctcctgtgggagcctcaatgttaccctggaacaccccctcttcgttggaggaatgtgccaaaactgcaagaactgctttctggagtgtgcgtaccagtacgacgacgacggctaccagtcctactgcaccatctgctgtgggggccgtgaggtgctcatgtgcggaaacaacaactgctgcaggtgcttttgcgtggagtgtgtggacctcttggtggggccgggggctgcccaggcagccattaaggaagacccctggaactgctacatgtgcgggcacaagggtacctacgggctgctgcggcggcgagaggactggccctcccggctccagatgttcttcgctaataaccacgaccaggaatttgaccctccaaaggtttacccacctgtcccagctgagaagaggaagcccatccgggtgctgtctctctttgatggaatcgctacagggctcctggtgctgaaggacttgggcattcaggtggaccgctacattgcctcggaggtgtgtgaggactccatcacggtgggcatggtgcggcaccaggggaagatcatgtacgtcggggacgtccgcagcgtcacacagaagcatatccaggagtggggcccattcgatctggtgattgggggcagtccctgcaatgacctctccatcgtcaaccctgctcgcaagggcctctacgagggcactggccggctcttctttgagttctaccgcctcctgcatgatgcgcggcccaaggagggagatgatcgccccttcttctggctctttgagaatgtggtggccatgggcgttagtgacaagagggacatctcgcgatttctcgagtccaaccctgtgatgattgatgccaaagaagtgtcagctgcacacagggcccgctacttctggggtaaccttcccggtatgaacaggccgttggcatccactgtgaatgataagctggagctgcaggagtgtctggagcatggcaggatagccaagttcagcaaagtgaggaccattactacgaggtcaaactccataaagcagggcaaagaccagcattttcctgtcttcatgaatgagaaagaggacatcttatggtgcactgaaatggaaagggtatttggtttcccagtccactatactgacgtctccaacatgagccgcttggcgaggcagagactgctgggccggtcatggagcgtgccagtcatccgccacctcttcgctccgctgaaggagtattttgcgtgtgtgtaagggacatgggggcaaactgaggtagcgacacaaagtt

SEQ ID NO: 231 - RNA, 943 nt, Homo sapiens
  source 1..943: mol_type = other RNA
gcggggacccagcgcagaagcagcgccaggtggagccatcgaagcccccacccacaggctgacagaggcaccgttcaccagagggctcaacaccgggatctatgtttaagttttaactctcgcctccaaagaccacgataattccttccccaaagcccagcagccccccagccccgcgcagccccagcctgcctcccggcgcccagatgcccgccatgccctccagcggccccggggacaccagcagctctgctgcggagcgggaggaggaccgaaaggacggagaggagcaggaggagccgcgtggcaaggaggagcgccaagagcccagcaccacggcacggaaggtggggcggcctgggaggaagcgcaagcaccccccggtggaaagcggtgacacgccaaaggaccctgcggtgatctccaagtccccatccatggcccaggactcaggcgcctcagagctattacccaatggggacttggagaagcggagtgagccccagccagaggaggggagccctgctggggggcagaagggcggggccccagcagagggagagggtgcagctgagaccctgcctgaagcctcaagagcagtggaaaatggctgctgcacccccaaggagggccgaggagcccctgcagaagcgggtgagtcctcagcaccaggggcagcctcttctgggcccaccagcataccctgagagtcagggacttggctctccagcaggtcccaggaaggatggtctgggtcgtggctaaaggtctgcttgccaaggctatggcctggaggctactggctggatgcagcctgcgcatatgttttatttggcccatagagtgttttaaacatttaaaaaattagttgccagtatttaaaaatcaaaaaatttcacataaaaatctggagttttggcttctcatgaaaaaaaaaaaaaaa

SEQ ID NO: 232 - RNA, 4279 nt, Homo sapiens
  source 1..4279: mol_type = other RNA
gacgcggcgccgcggcaccagggcgcgcagccgggccggcccgaccccaccggccatacggtggagccatcgaagcccccacccacaggctgacagaggcaccgttcaccagagggctcaacaccgggatctatgtttaagttttaactctcgcctccaaagaccacgataattccttccccaaagcccagcagccccccagccccgcgcagccccagcctgcctcccggcgcccagatgcccgccatgccctccagcggccccggggacaccagcagctctgctgcggagcgggaggaggaccgaaaggacggagaggagcaggaggagccgcgtggcaaggaggagcgccaagagcccagcaccacggcacggaaggtggggcggcctgggaggaagcgcaagcaccccccggtggaaagcggtgacacgccaaaggaccctgcggtgatctccaagtccccatccatggcccaggactcaggcgcctcagagctattacccaatggggacttggagaagcggagtgagccccagccagaggaggggagccctgctggggggcagaagggcggggccccagcagagggagagggtgcagctgagaccctgcctgaagcctcaagagcagtggaaaatggctgctgcacccccaaggagggccgaggagcccctgcagaagcgggcaaagaacagaaggagaccaacatcgaatccatgaaaatggagggctcccggggccggctgcggggtggcttgggctgggagtccagcctccgtcagcggcccatgccgaggctcaccttccaggcgggggacccctactacatcagcaagcgcaagcgggacgagtggctggcacgctggaaaagggaggctgagaagaaagccaaggtcattgcaggaatgaatgctgtggaagaaaaccaggggcccggggagtctcagaaggtggaggaggccagccctcctgctgtgcagcagcccactgaccccgcatcccccactgtggctaccacgcctgagcccgtggggtccgatgctggggacaagaatgccaccaaagcaggcgatgacgagccagagtacgaggacggccggggctttggcattggggagctggtgtgggggaaactgcggggcttctcctggtggccaggccgcattgtgtcttggtggatgacgggccggagccgagcagctgaaggcacccgctgggtcatgtggttcggagacggcaaattctcagtggtgtgtgttgagaagctgatgccgctgagctcgttttgcagtgcgttccaccaggccacgtacaacaagcagcccatgtaccgcaaagccatctacgaggtcctgcaggtggccagcagccgcgcggggaagctgttcccggtgtgccacgacagcgatgagagtgacactgccaaggccgtggaggtgcagaacaagcccatgattgaatgggccctggggggcttccagccttctggccctaagggcctggagccaccagaagaagagaagaatccctacaaagaagtgtacacggacatgtgggtggaacctgaggcagctgcctacgcaccacctccaccagccaaaaagccccggaagagcacagcggagaagcccaaggtcaaggagattattgatgagcgcacaagagagcggctggtgtacgaggtgcggcagaagtgccggaacattgaggacatctgcatctcctgtgggagcctcaatgttaccctggaacaccccctcttcgttggaggaatgtgccaaaactgcaagaactgctttctggagtgtgcgtaccagtacgacgacgacggctaccagtcctactgcaccatctgctgtgggggccgtgaggtgctcatgtgcggaaacaacaactgctgcaggtgcttttgcgtggagtgtgtggacctcttggtggggccgggggctgcccaggcagccattaaggaagacccctggaactgctacatgtgcgggcacaagggtacctacgggctgctgcggcggcgagaggactggccctcccggctccagatgttcttcgctaataaccacgaccaggaatttgaccctccaaaggtttacccacctgtcccagctgagaagaggaagcccatccgggtgctgtctctctttgatggaatcgctacagggctcctggtgctgaaggacttgggcattcaggtggaccgctacattgcctcggaggtgtgtgaggactccatcacggtgggcatggtgcggcaccaggggaagatcatgtacgtcggggacgtccgcagcgtcacacagaagcatatccaggagtggggcccattcgatctggtgattgggggcagtccctgcaatgacctctccatcgtcaaccctgctcgcaagggcctctacgagggcactggccggctcttctttgagttctaccgcctcctgcatgatgcgcggcccaaggagggagatgatcgccccttcttctggctctttgagaatgtggtggccatgggcgttagtgacaagagggacatctcgcgatttctcgagtccaaccctgtgatgattgatgccaaagaagtgtcagctgcacacagggcccgctacttctggggtaaccttcccggtatgaacaggccgttggcatccactgtgaatgataagctggagctgcaggagtgtctggagcatggcaggatagccaagttcagcaaagtgaggaccattactacgaggtcaaactccataaagcagggcaaagaccagcattttcctgtcttcatgaatgagaaagaggacatcttatggtgcactgaaatggaaagggtatttggtttcccagtccactatactgacgtctccaacatgagccgcttggcgaggcagagactgctgggccggtcatggagcgtgccagtcatccgccacctcttcgctccgctgaaggagtattttgcgtgtgtgtaagggacatgggggcaaactgaggtagcgacacaaagttaaacaaacaaacaaaaaacacaaaacataataaaacaccaagaacatgaggatggagagaagtatcagcacccagaagagaaaaaggaatttaaaacaaaaaccacagaggcggaaataccggagggctttgccttgcgaaaagggttggacatcatctcctgatttttcaatgttattcttcagtcctatttaaaaacaaaaccaagctcccttcccttcctcccccttcccttttttttcggtcagaccttttattttctactcttttcagaggggttttctgtttgtttgggttttgtttcttgctgtgactgaaacaagaaggttattgcagcaaaaatcagtaacaaaaaatagtaacaataccttgcagaggaaaggtgggagagaggaaaaaaggaaattctatagaaatctatatattgggttgtttttttttttgttttttgttttttttttttgggtttttttttttactatatatcttttttttgttgtctctagcctgatcagataggagcacaagcaggggacggaaagagagagacactcaggcggcagcattccctcccagccactgagctgtcgtgccagcaccattcctggtcacgcaaaacagaacccagttagcagcagggagacgagaacaccacacaagacatttttctacagtatttcaggtgcctaccacacaggaaaccttgaagaaaatcagtttctagaagccgctgttacctcttgtttacagtttatatatatatgatagatatgagatatatatataaaaggtactgttaactactgtacaacccgacttcataatggtgctttcaaacagcgagatgagtaaaaacatcagcttccacgttgccttctgcgcaaagggtttcaccaaggatggagaaagggagacagcttgcagatggcgcgttctcacggtgggctcttccccttggtttgtaacgaagtgaaggaggagaacttgggagccaggttctccctgccaaaaagggggctagatgaggtggtcgggcccgtggacagctgagagtgggattcatccagactcatgcaataaccctttgattgttttctaaaaggagactccctcggcaagatggcagagggtacggagtcttcaggcccagtttctcactttagccaattcgagggctccttgtggtgggatcagaactaatccagagtgtgggaaagtgacagtcaaaaccccacctggagcaaataaaaaaacatacaaaacgta

SEQ ID NO: 233 - RNA, 4477 nt, Homo sapiens
  source 1..4477: mol_type = other RNA
ggggccgctgtccctgcggccagtgctggatgcggggacccagcgcagaagcagcgccaggtggagccatcgaagcccccacccacaggctgacagaggcaccgttcaccagagggctcaacaccgggatctatgtttaagttttaactctcgcctccaaagaccacgataattccttccccaaagcccagcagccccccagccccgcgcagccccagcctgcctcccggcgcccagatgcccgccatgccctccagcggccccggggacaccagcagctctgctgcggagcgggaggaggaccgaaaggacggagaggagcaggaggagccgcgtggcaaggaggagcgccaagagcccagcaccacggcacggaaggtggggcggcctgggaggaagcgcaagcaccccccggtggaaagcggtgacacgccaaaggaccctgcggtgatctccaagtccccatccatggcccaggactcaggcgcctcagagctattacccaatggggacttggagaagcggagtgagccccagccagaggaggggagccctgctggggggcagaagggcggggccccagcagagggagagggtgcagctgagaccctgcctgaagcctcaagagcagtggaaaatggctgctgcacccccaaggagggccgaggagcccctgcagaagcgggcaaagaacagaaggagaccaacatcgaatccatgaaaatggagggctcccggggccggctgcggggtggcttgggctgggagtccagcctccgtcagcggcccatgccgaggctcaccttccaggcgggggacccctactacatcagcaagcgcaagcgggacgagtggctggcacgctggaaaagggaggctgagaagaaagccaaggtcattgcaggaatgaatgctgtggaagaaaaccaggggcccggggagtctcagaaggtggaggaggccagccctcctgctgtgcagcagcccactgaccccgcatcccccactgtggctaccacgcctgagcccgtggggtccgatgctggggacaagaatgccaccaaagcaggcgatgacgagccagagtacgaggacggccggggctttggcattggggagctggtgtgggggaaactgcggggcttctcctggtggccaggccgcattgtgtcttggtggatgacgggccggagccgagcagctgaaggcacccgctgggtcatgtggttcggagacggcaaattctcagtggtgtgtgttgagaagctgatgccgctgagctcgttttgcagtgcgttccaccaggccacgtacaacaagcagcccatgtaccgcaaagccatctacgaggtcctgcaggtggccagcagccgcgcggggaagctgttcccggtgtgccacgacagcgatgagagtgacactgccaaggccgtggaggtgcagaacaagcccatgattgaatgggccctggggggcttccagccttctggccctaagggcctggagccaccagaagaagagaagaatccctacaaagaagtgtacacggacatgtgggtggaacctgaggcagctgcctacgcaccacctccaccagccaaaaagccccggaagagcacagcggagaagcccaaggtcaaggagattattgatgagcgcacaagagagcggctggtgtacgaggtgcggcagaagtgccggaacattgaggacatctgcatctcctgtgggagcctcaatgttaccctggaacaccccctcttcgttggaggaatgtgccaaaactgcaagaactgctttctggagtgtgcgtaccagtacgacgacgacggctaccagtcctactgcaccatctgctgtgggggccgtgaggtgctcatgtgcggaaacaacaactgctgcaggtgcttttgcgtggagtgtgtggacctcttggtggggccgggggctgcccaggcagccattaaggaagacccctggaactgctacatgtgcgggcacaagggtacctacgggctgctgcggcggcgagaggactggccctcccggctccagatgttcttcgctaataaccacgaccaggaatttgaccctccaaaggtttacccacctgtcccagctgagaagaggaagcccatccgggtgctgtctctctttgatggaatcgctacagggctcctggtgctgaaggacttgggcattcaggtggaccgctacattgcctcggaggtgtgtgaggactccatcacggtgggcatggtgcggcaccaggggaagatcatgtacgtcggggacgtccgcagcgtcacacagaagcatatccaggagtggggcccattcgatctggtgattgggggcagtccctgcaatgacctctccatcgtcaaccctgctcgcaagggcctctacgagggcactggccggctcttctttgagttctaccgcctcctgcatgatgcgcggcccaaggagggagatgatcgccccttcttctggctctttgagaatgtggtggccatgggcgttagtgacaagagggacatctcgcgatttctcgaggtacaaaatagccacctgtactagtgggctagtggccactgaattgaacagtgtagaggacaacccaccatcgcagaagttcatttggacaatgctgatctagaacgttccagtgacagcttgtggaatgtggctaggtgtaattccagcttctcctggaggctgcaggctagcccagtgtgtggctcctgagagagaatccaaccctgtgatgattgatgccaaagaagtgtcagctgcacacagggcccgctacttctggggtaaccttcccggtatgaacaggccgttggcatccactgtgaatgataagctggagctgcaggagtgtctggagcatggcaggatagccaagttcagcaaagtgaggaccattactacgaggtcaaactccataaagcagggcaaagaccagcattttcctgtcttcatgaatgagaaagaggacatcttatggtgcactgaaatggaaagggtatttggtttcccagtccactatactgacgtctccaacatgagccgcttggcgaggcagagactgctgggccggtcatggagcgtgccagtcatccgccacctcttcgctccgctgaaggagtattttgcgtgtgtgtaagggacatgggggcaaactgaggtagcgacacaaagttaaacaaacaaacaaaaaacacaaaacataataaaacaccaagaacatgaggatggagagaagtatcagcacccagaagagaaaaaggaatttaaaacaaaaaccacagaggcggaaataccggagggctttgccttgcgaaaagggttggacatcatctcctgatttttcaatgttattcttcagtcctatttaaaaacaaaaccaagctcccttcccttcctcccccttcccttttttttcggtcagaccttttattttctactcttttcagaggggttttctgtttgtttgggttttgtttcttgctgtgactgaaacaagaaggttattgcagcaaaaatcagtaacaaaaaatagtaacaataccttgcagaggaaaggtgggagagaggaaaaaaggaaattctatagaaatctatatattgggttgtttttttttttgttttttgttttttttttttgggtttttttttttactatatatcttttttttgttgtctctagcctgatcagataggagcacaagcaggggacggaaagagagagacactcaggcggcagcattccctcccagccactgagctgtcgtgccagcaccattcctggtcacgcaaaacagaacccagttagcagcagggagacgagaacaccacacaagacatttttctacagtatttcaggtgcctaccacacaggaaaccttgaagaaaatcagtttctagaagccgctgttacctcttgtttacagtttatatatatatgatagatatgagatatatatataaaaggtactgttaactactgtacaacccgacttcataatggtgctttcaaacagcgagatgagtaaaaacatcagcttccacgttgccttctgcgcaaagggtttcaccaaggatggagaaagggagacagcttgcagatggcgcgttctcacggtgggctcttccccttggtttgtaacgaagtgaaggaggagaacttgggagccaggttctccctgccaaaaagggggctagatgaggtggtcgggcccgtggacagctgagagtgggattcatccagactcatgcaataaccctttgattgttttctaaaaggagactccctcggcaagatggcagagggtacggagtcttcaggcccagtttctcactttagccaattcgagggctccttgtggtgggatcagaactaatccagagtgtgggaaagtgacagtcaaaaccccacctggagcaaataaaaaaacatacaaaacgt

SEQ ID NO: 234 - RNA, 3585 nt, Homo sapiens
  source 1..3585: mol_type = other RNA
ggatctccgcagccctccgggtttgaaaagagtgaagtatgcctccccggcccgcagcagccgcggcgtcccggcctggcccgagttctggagatgctgacttagtgctggcccgccgccttcctgcccacgagccccaaggccccactcctcgagggctccagtggcacctggcgccctcgggggacaggaagagcagccggccgggagcccgggcagtggctgagaagaaagccaaggtcattgcaggaatgaatgctgtggaagaaaaccaggggcccggggagtctcagaaggtggaggaggccagccctcctgctgtgcagcagcccactgaccccgcatcccccactgtggctaccacgcctgagcccgtggggtccgatgctggggacaagaatgccaccaaagcaggcgatgacgagccagagtacgaggacggccggggctttggcattggggagctggtgtgggggaaactgcggggcttctcctggtggccaggccgcattgtgtcttggtggatgacgggccggagccgagcagctgaaggcacccgctgggtcatgtggttcggagacggcaaattctcagtggtgtgtgttgagaagctgatgccgctgagctcgttttgcagtgcgttccaccaggccacgtacaacaagcagcccatgtaccgcaaagccatctacgaggtcctgcaggtggccagcagccgcgcggggaagctgttcccggtgtgccacgacagcgatgagagtgacactgccaaggccgtggaggtgcagaacaagcccatgattgaatgggccctggggggcttccagccttctggccctaagggcctggagccaccagaagaagagaagaatccctacaaagaagtgtacacggacatgtgggtggaacctgaggcagctgcctacgcaccacctccaccagccaaaaagccccggaagagcacagcggagaagcccaaggtcaaggagattattgatgagcgcacaagagagcggctggtgtacgaggtgcggcagaagtgccggaacattgaggacatctgcatctcctgtgggagcctcaatgttaccctggaacaccccctcttcgttggaggaatgtgccaaaactgcaagaactgctttctggagtgtgcgtaccagtacgacgacgacggctaccagtcctactgcaccatctgctgtgggggccgtgaggtgctcatgtgcggaaacaacaactgctgcaggtgcttttgcgtggagtgtgtggacctcttggtggggccgggggctgcccaggcagccattaaggaagacccctggaactgctacatgtgcgggcacaagggtacctacgggctgctgcggcggcgagaggactggccctcccggctccagatgttcttcgctaataaccacgaccaggaatttgaccctccaaaggtttacccacctgtcccagctgagaagaggaagcccatccgggtgctgtctctctttgatggaatcgctacagggctcctggtgctgaaggacttgggcattcaggtggaccgctacattgcctcggaggtgtgtgaggactccatcacggtgggcatggtgcggcaccaggggaagatcatgtacgtcggggacgtccgcagcgtcacacagaagcatatccaggagtggggcccattcgatctggtgattgggggcagtccctgcaatgacctctccatcgtcaaccctgctcgcaagggcctctacgagggcactggccggctcttctttgagttctaccgcctcctgcatgatgcgcggcccaaggagggagatgatcgccccttcttctggctctttgagaatgtggtggccatgggcgttagtgacaagagggacatctcgcgatttctcgagtccaaccctgtgatgattgatgccaaagaagtgtcagctgcacacagggcccgctacttctggggtaaccttcccggtatgaacaggccgttggcatccactgtgaatgataagctggagctgcaggagtgtctggagcatggcaggatagccaagttcagcaaagtgaggaccattactacgaggtcaaactccataaagcagggcaaagaccagcattttcctgtcttcatgaatgagaaagaggacatcttatggtgcactgaaatggaaagggtatttggtttcccagtccactatactgacgtctccaacatgagccgcttggcgaggcagagactgctgggccggtcatggagcgtgccagtcatccgccacctcttcgctccgctgaaggagtattttgcgtgtgtgtaagggacatgggggcaaactgaggtagcgacacaaagttaaacaaacaaacaaaaaacacaaaacataataaaacaccaagaacatgaggatggagagaagtatcagcacccagaagagaaaaaggaatttaaaacaaaaaccacagaggcggaaataccggagggctttgccttgcgaaaagggttggacatcatctcctgatttttcaatgttattcttcagtcctatttaaaaacaaaaccaagctcccttcccttcctcccccttcccttttttttcggtcagaccttttattttctactcttttcagaggggttttctgtttgtttgggttttgtttcttgctgtgactgaaacaagaaggttattgcagcaaaaatcagtaacaaaaaatagtaacaataccttgcagaggaaaggtgggagagaggaaaaaaggaaattctatagaaatctatatattgggttgtttttttttttgttttttgttttttttttttgggtttttttttttactatatatcttttttttgttgtctctagcctgatcagataggagcacaagcaggggacggaaagagagagacactcaggcggcagcattccctcccagccactgagctgtcgtgccagcaccattcctggtcacgcaaaacagaacccagttagcagcagggagacgagaacaccacacaagacatttttctacagtatttcaggtgcctaccacacaggaaaccttgaagaaaatcagtttctagaagccgctgttacctcttgtttacagtttatatatatatgatagatatgagatatatatataaaaggtactgttaactactgtacaacccgacttcataatggtgctttcaaacagcgagatgagtaaaaacatcagcttccacgttgccttctgcgcaaagggtttcaccaaggatggagaaagggagacagcttgcagatggcgcgttctcacggtgggctcttccccttggtttgtaacgaagtgaaggaggagaacttgggagccaggttctccctgccaaaaagggggctagatgaggtggtcgggcccgtggacagctgagagtgggattcatccagactcatgcaataaccctttgattgttttctaaaaggagactccctcggcaagatggcagagggtacggagtcttcaggcccagtttctcactttagccaattcgagggctccttgtggtgggatcagaactaatccagagtgtgggaaagtgacagtcaa

SEQ ID NO: 235 - DNA, 9501 bp, Homo sapiens
  source 1..9501: mol_type = genomic DNA
gcagtgggctctggcggaggtcgggagaactgcagggcgaaggccgccgggggctccgcgggctgcggggggaggcacttgacaccggcccggggagaggaggggccgctgtccctgcggccagtgctggatgcggggacccagcgcagaagcagcgccaggtggagccatcgaagcccccacccacaggctgacagaggcaccgttcaccagagggctcaacaccgggatctatgtttaagttttaactctcgcctccaaagaccacgataattccttccccaaagcccagcagccccccagccccgcgcagccccagcctgcctcccggcgcccagatgcccgccatgccctccagcggccccggggacaccagcagctctgctgcggagcgggaggaggaccgaaaggacggagaggagcaggaggagccgcgtggcaaggaggagcgccaagagcccagcaccacggcacggaaggtggggcggcctgggaggaagcgcaagcaccccccggtggaaagcggtgacacgccaaaggaccctgcggtgatctccaagtccccatccatggcccaggactcaggcgcctcagagctattacccaatggggacttggagaagcggagtgagccccagccagaggaggggagccctgctggggggcagaagggcggggccccagcagagggagagggtgcagctgagaccctgcctgaagcctcaagagcagtggaaaatggctgctgcacccccaaggagggccgaggagcccctgcagaagcgggcaaagaacagaaggagaccaacatcgaatccatgaaaatggagggctcccggggccggctgcggggtggcttgggctgggagtccagcctccgtcagcggcccatgccgaggctcaccttccaggcgggggacccctactacatcagcaagcgcaagcgggacgagtggctggcacgctggaaaagggaggctgagaagaaagccaaggtcattgcaggaatgaatgctgtggaagaaaaccaggggcccggggagtctcagaaggtggaggaggccagccctcctgctgtgcagcagcccactgaccccgcatcccccactgtggctaccacgcctgagcccgtggggtccgatgctggggacaagaatgccaccaaagcaggcgatgacgagccagagtacgaggacggccggggctttggcattggggagctggtgtgggggaaactgcggggcttctcctggtggccaggccgcattgtgtcttggtggatgacgggccggagccgagcagctgaaggcacccgctgggtcatgtggttcggagacggcaaattctcagtggtgtgtgttgagaagctgatgccgctgagctcgttttgcagtgcgttccaccaggccacgtacaacaagcagcccatgtaccgcaaagccatctacgaggtcctgcaggtggccagcagccgcgcggggaagctgttcccggtgtgccacgacagcgatgagagtgacactgccaaggccgtggaggtgcagaacaagcccatgattgaatgggccctggggggcttccagccttctggccctaagggcctggagccaccagaagaagagaagaatccctacaaagaagtgtacacggacatgtgggtggaacctgaggcagctgcctacgcaccacctccaccagccaaaaagccccggaagagcacagcggagaagcccaaggtcaaggagattattgatgagcgcacaagagagcggctggtgtacgaggtgcggcagaagtgccggaacattgaggacatctgcatctcctgtgggagcctcaatgttaccctggaacaccccctcttcgttggaggaatgtgccaaaactgcaagaactgctttctggagtgtgcgtaccagtacgacgacgacggctaccagtcctactgcaccatctgctgtgggggccgtgaggtgctcatgtgcggaaacaacaactgctgcaggtgcttttgcgtggagtgtgtggacctcttggtggggccgggggctgcccaggcagccattaaggaagacccctggaactgctacatgtgcgggcacaagggtacctacgggctgctgcggcggcgagaggactggccctcccggctccagatgttcttcgctaataaccacgaccaggaatttgaccctccaaaggtttacccacctgtcccagctgagaagaggaagcccatccgggtgctgtctctctttgatggaatcgctacagggctcctggtgctgaaggacttgggcattcaggtggaccgctacattgcctcggaggtgtgtgaggactccatcacggtgggcatggtgcggcaccaggggaagatcatgtacgtcggggacgtccgcagcgtcacacagaagcatatccaggagtggggcccattcgatctggtgattgggggcagtccctgcaatgacctctccatcgtcaaccctgctcgcaagggcctctacgagggcactggccggctcttctttgagttctaccgcctcctgcatgatgcgcggcccaaggagggagatgatcgccccttcttctggctctttgagaatgtggtggccatgggcgttagtgacaagagggacatctcgcgatttctcgagtccaaccctgtgatgattgatgccaaagaagtgtcagctgcacacagggcccgctacttctggggtaaccttcccggtatgaacaggccgttggcatccactgtgaatgataagctggagctgcaggagtgtctggagcatggcaggatagccaagttcagcaaagtgaggaccattactacgaggtcaaactccataaagcagggcaaagaccagcattttcctgtcttcatgaatgagaaagaggacatcttatggtgcactgaaatggaaagggtatttggtttcccagtccactatactgacgtctccaacatgagccgcttggcgaggcagagactgctgggccggtcatggagcgtgccagtcatccgccacctcttcgctccgctgaaggagtattttgcgtgtgtgtaagggacatgggggcaaactgaggtagcgacacaaagttaaacaaacaaacaaaaaacacaaaacataataaaacaccaagaacatgaggatggagagaagtatcagcacccagaagagaaaaaggaatttaaaacaaaaaccacagaggcggaaataccggagggctttgccttgcgaaaagggttggacatcatctcctgatttttcaatgttattcttcagtcctatttaaaaacaaaaccaagctcccttcccttcctcccccttcccttttttttcggtcagaccttttattttctactcttttcagaggggttttctgtttgtttgggttttgtttcttgctgtgactgaaacaagaaggttattgcagcaaaaatcagtaacaaaaaatagtaacaataccttgcagaggaaaggtgggagagaggaaaaaaggaaattctatagaaatctatatattgggttgtttttttttttgttttttgttttttttttttgggtttttttttttactatatatcttttttttgttgtctctagcctgatcagataggagcacaagcaggggacggaaagagagagacactcaggcggcagcattccctcccagccactgagctgtcgtgccagcaccattcctggtcacgcaaaacagaacccagttagcagcagggagacgagaacaccacacaagacatttttctacagtatttcaggtgcctaccacacaggaaaccttgaagaaaatcagtttctagaagccgctgttacctcttgtttacagtttatatatatatgatagatatgagatatatatataaaaggtactgttaactactgtacaacccgacttcataatggtgctttcaaacagcgagatgagtaaaaacatcagcttccacgttgccttctgcgcaaagggtttcaccaaggatggagaaagggagacagcttgcagatggcgcgttctcacggtgggctcttccccttggtttgtaacgaagtgaaggaggagaacttgggagccaggttctccctgccaaaaagggggctagatgaggtggtcgggcccgtggacagctgagagtgggattcatccagactcatgcaataaccctttgattgttttctaaaaggagactccctcggcaagatggcagagggtacggagtcttcaggcccagtttctcactttagccaattcgagggctccttgtggtgggatcagaactaatccagagtgtgggaaagtgacagtcaaaaccccacctggagcaaataaaaaaacatacaaaacgtactggtgctttcctgtctaagtcgccttttgtgtgttcttttatgaggcccccaccatccacccctctgtgcacaaggcggctcccggcccctggaatgtgatgtttttggtcatctccaaaggctgcagttttatactgggaggctgatgacaccttttattataattattcttatggttctggttataattatgtttgttttaagattttctttaagaaaacaaaaacccaacacccttccctttaggtttcaaaccaaggtgcgggagcagggtgcttctgagttagcggtggctctggtgccctggctcccacccctcgggccaggtgggccactgggcatggtgacagctgggcggccagggagtccccaaggtctgccttctgggcttgtcactcttctcttctacttcccctcctcttgagtcgggtgtgtcagggctggagggaggaccggccgtctctctccttgtgtgtgtgattggagtggtgtgtatttcttttctagtacttggtctgatgatagctgtgctcttacctcgagtcagcagcacctggagccccaagtgctcaacactttgttctacttcctacaaggcaggcggcctggcgtcagtagtaggaagggatggcattgttggctccagggtgagggcccgacgggcaggtgcttgcctgggtagatggggtgtagatatgtggcatatagagatatatattttataatgggaggggggatggcacctcctgggactggtagagctgggaggtgtgtcggcaagcacatggccccaagtccacgtccctagaaagatggggcctacagtgataggcgctctataaatacatagatagggtcatgtttaagaaatattatggggtggggagtgggggaagcaggcttagtgtgctgagcctcggtccccactgcagacctaaaccccacaccaatcagtcaatctcacacgcatacacaggagcatatttctgtactgatgcataatgaatgcactcacacacacacacacacgccagggggctcccagcactcttctcccagggttcaggactttgtggagtcagcccgtgcagctatttacctctgttgccctgattgcaggtagactgtcaatcccagaagttgctaggtgctgaggcaggaaaaggaggaggtttcttttagcaggtgctctcctctagcaggtagtgttctatctcttttgcccctggtgatgtcaaaagattcttctgttagcaacctgtgatactgacctgcaactctaggcaccagtcaagtcagccctcaactccccctacctattctccccaactgaaatcaaattgacatccaggtctgtcttggccagggggcttccattggggaaaaaaaatgggacagtgaacctcacctattgaataaaccaaattagtaattagtgacaaaaccaaaccaaggctttggaccccctgctcattactcaggagtaaattcacacagctggtggccggtctcacccctttttggggtgcttggtcctggaccccaatctactgtctcctcgacagattggtgtttaagatcatgcccagttgcttcctgtcacctcttgacaggtggtgactgggctgctgtggggctggagcagcgaggaagggagcctctgccccctcagtggagtccctgtgctaactgtggtgctcacccagctcctccttgctcccgcggggctctgtccttcgggcctggagtccaccagcgccactccaggagggctgggggaggaggggctgcctcaggcagtccaaggtgctccctcccccgctggccaatgctaaggtcttcccggctcccagggtcaggacagagtcttctaaggctcaggctctcccaagccactgcttagtgacagttagcctttcccagcggcccaagctccaccggaactgggcctggtgctccaaccaaagggttggtgttgggacttgggaagagacttggtagccaagggcatggcaagcctgggggattcctgtgggccggcttgctcgaggagggagtgctgggcacagaggagcccttatggctgacagcttgagagcacttgttcctccagatctagccacttgaccaggccctagaatggaccagatgccccaggggtcatggcccccccccccccccccttgcagggacgagagttaacaatcaccagcttttcttccggcccagcctgtgtgcttggtctcacagtagaatttaggagagtgtggggctttgggattgtgccaacttggccaagctgagatatgcttaatccacctcaacgctggggcctctggggacaggtattgggtcaccttccaaggggtgctgaacttcagcaggctgtagataaggcagaggttagaggcagtggagtgggggaaccaagaaggcctagggaaaattgccaggcatattccctgtggaattttctttccgaagagtaggcccatttcccccttagaaacaagggttctgggggctgatgacagcttcccctgcaggtgccaggtggcgcatgatgccaaagagatccgtggctcttgcctgggggaggtagccaggtgctcgtgctggggacacagtccttggcctcctgcctaagcaggaagctagtttccagcaggcggctggtactaaccccccgccccacgggagcgacaggctggtgcaccggcagactggggggccgcaggcgggcactagcaggggtctgcagtccatagatgatgacatgaatctgttgctgtccttttgtctctaggccccagagacttcttgctattgaacatcctattggaaagcaaactttccaagagagcacccgggacctgttagcttttgaaacaggcctgggtgtgattgactggtagagatgcctgtgtgatttttggcgcattgcaggagtgtggattgggacaggcaccccagcaggaaggaaggctgacaccaaaggggtctcacagggcccagctccccttgcttcccgataattggccaccaggccatggcgactctggggaagcctagatgggaacacccaccttctccagcagtagaaggaatatttcagcagagccatctgggagatgttcttataggaaaactgcagtcattcatttcatagttttgcttatataaatagagtacatttgggaggcagttttgaattcctgttgctactctgcttggtgcggagttgcagtggccccaagtgtctttcagagctgttgcttttaggatccccctcaagctgtgggttagggccagggcagggagggggtgctgcctggcactgtgccctgaagagggctgcttgcttcctttggtcgggagcacggcagagccaacattctggtgggaaccgagtttctagccaggcccctgttttggtcccgggaggtgagtaatctgagtttgtcattgcgtattctccacgctgcctgctctcagtgctggagactagagagcgaccctggagttgtcctctgggagtcctgcctgtttgccagggagcagctgaaacctccccgctcccaatcccgggggtggaaaaggtgtagtggaggaatggtctggagctgggatggcccttctggccatgccctgctgagccaggattaaggaaagtgtcagccgcctccttaccaggccctgtgctggggtcaggaggaccgggaggagagggaaggggtgagaggatggactctgctgttgtagtgtgagctctggaatctttacgttttggtaaaggcaggccagggtctttgaggatcgagttggggaaccttgcctctgtgtttccgagacccagctaaggtgggcctttggtgggtgacctgtctctgacccgaggcagcagagttttgggggagggagaaacaagcaaggagcagggaggacaaggacacaagatccctttgctggtggtgacttactcacttcccccaccagagggcctgggactcccgaaactcccgtaactggaaagctccctggctcagctccactggggggtgaggagggcggctccctcagccccagcctagcggcctccaaccctgtgcctgagaacatgagcagcggtctaaagcatcccctagtcccatttcacttcacagaccgatttggttgcacagccctagaattcaacagacaacaaaaatgctgaaattccttagaatacgcagagggaggaggtgactcaccaaggtgctaaaacattttattaaaaatatatattgttaaattaagtctgctgtctggacaatgactgtttgttttgttttcttgtagtggagtttaaaagagactattattttactctgatatattattattaaaaaggcattttaactttgtacttgaaaactaaatgagcgatttcatgtgttttagctgaggcattgaagtagcgggtgcttacttatttgtgggaaatcatgtattcatactgaagaataaactccgtagctgatttggtaataacttttactgttacagacgatttcgctttgaccccggtggcagagcacttttactccacattccacgcagctaaatgcaggacttcccagactcttccctccccagccctctttcctttctcttaagttcctcttttctcctttattattattatttttttttcctggttccagcatcctttcaccactgtattttttttttttttttttttttttttttttttttttttttttttttttttttagggttgcttctctatttattgacaataataatgtacatttcacagtctggttctaggacattcagggaagggcgagtgggggcccgaggggtccctgccccacccgcctggtgtcctgttgtatctctgtgtaagtgatgctcgtgacatagctgtttatgaaataattaaagaggtcaatgcgtacaacagatgtagaaagtctgtcagttccgccttcatcacatttttttttgtgcccagaagaatataataaagctcctttctaatgtacttgtgctggagaacacttgaataaatggactgtttttgtgcaaaaagaaaaatggaaaagcaccgtaataa

SEQ ID NO: 236 - DNA, 9421 bp, Homo sapiens
  source 1..9421: mol_type = genomic DNA
gcgcgggcggcggcggcggcgagagcagaggacgagccgggacgcggcgccgcggcaccagggcgcgcagccgggccggcccgaccccaccggccatacggtggagccatcgaagcccccacccacaggctgacagaggcaccgttcaccagagggctcaacaccgggatctatgtttaagttttaactctcgcctccaaagaccacgataattccttccccaaagcccagcagccccccagccccgcgcagccccagcctgcctcccggcgcccagatgcccgccatgccctccagcggccccggggacaccagcagctctgctgcggagcgggaggaggaccgaaaggacggagaggagcaggaggagccgcgtggcaaggaggagcgccaagagcccagcaccacggcacggaaggtggggcggcctgggaggaagcgcaagcaccccccggtggaaagcggtgacacgccaaaggaccctgcggtgatctccaagtccccatccatggcccaggactcaggcgcctcagagctattacccaatggggacttggagaagcggagtgagccccagccagaggaggggagccctgctggggggcagaagggcggggccccagcagagggagagggtgcagctgagaccctgcctgaagcctcaagagcagtggaaaatggctgctgcacccccaaggagggccgaggagcccctgcagaagcgggcaaagaacagaaggagaccaacatcgaatccatgaaaatggagggctcccggggccggctgcggggtggcttgggctgggagtccagcctccgtcagcggcccatgccgaggctcaccttccaggcgggggacccctactacatcagcaagcgcaagcgggacgagtggctggcacgctggaaaagggaggctgagaagaaagccaaggtcattgcaggaatgaatgctgtggaagaaaaccaggggcccggggagtctcagaaggtggaggaggccagccctcctgctgtgcagcagcccactgaccccgcatcccccactgtggctaccacgcctgagcccgtggggtccgatgctggggacaagaatgccaccaaagcaggcgatgacgagccagagtacgaggacggccggggctttggcattggggagctggtgtgggggaaactgcggggcttctcctggtggccaggccgcattgtgtcttggtggatgacgggccggagccgagcagctgaaggcacccgctgggtcatgtggttcggagacggcaaattctcagtggtgtgtgttgagaagctgatgccgctgagctcgttttgcagtgcgttccaccaggccacgtacaacaagcagcccatgtaccgcaaagccatctacgaggtcctgcaggtggccagcagccgcgcggggaagctgttcccggtgtgccacgacagcgatgagagtgacactgccaaggccgtggaggtgcagaacaagcccatgattgaatgggccctggggggcttccagccttctggccctaagggcctggagccaccagaagaagagaagaatccctacaaagaagtgtacacggacatgtgggtggaacctgaggcagctgcctacgcaccacctccaccagccaaaaagccccggaagagcacagcggagaagcccaaggtcaaggagattattgatgagcgcacaagagagcggctggtgtacgaggtgcggcagaagtgccggaacattgaggacatctgcatctcctgtgggagcctcaatgttaccctggaacaccccctcttcgttggaggaatgtgccaaaactgcaagaactgctttctggagtgtgcgtaccagtacgacgacgacggctaccagtcctactgcaccatctgctgtgggggccgtgaggtgctcatgtgcggaaacaacaactgctgcaggtgcttttgcgtggagtgtgtggacctcttggtggggccgggggctgcccaggcagccattaaggaagacccctggaactgctacatgtgcgggcacaagggtacctacgggctgctgcggcggcgagaggactggccctcccggctccagatgttcttcgctaataaccacgaccaggaatttgaccctccaaaggtttacccacctgtcccagctgagaagaggaagcccatccgggtgctgtctctctttgatggaatcgctacagggctcctggtgctgaaggacttgggcattcaggtggaccgctacattgcctcggaggtgtgtgaggactccatcacggtgggcatggtgcggcaccaggggaagatcatgtacgtcggggacgtccgcagcgtcacacagaagcatatccaggagtggggcccattcgatctggtgattgggggcagtccctgcaatgacctctccatcgtcaaccctgctcgcaagggcctctacgagggcactggccggctcttctttgagttctaccgcctcctgcatgatgcgcggcccaaggagggagatgatcgccccttcttctggctctttgagaatgtggtggccatgggcgttagtgacaagagggacatctcgcgatttctcgagtccaaccctgtgatgattgatgccaaagaagtgtcagctgcacacagggcccgctacttctggggtaaccttcccggtatgaacaggccgttggcatccactgtgaatgataagctggagctgcaggagtgtctggagcatggcaggatagccaagttcagcaaagtgaggaccattactacgaggtcaaactccataaagcagggcaaagaccagcattttcctgtcttcatgaatgagaaagaggacatcttatggtgcactgaaatggaaagggtatttggtttcccagtccactatactgacgtctccaacatgagccgcttggcgaggcagagactgctgggccggtcatggagcgtgccagtcatccgccacctcttcgctccgctgaaggagtattttgcgtgtgtgtaagggacatgggggcaaactgaggtagcgacacaaagttaaacaaacaaacaaaaaacacaaaacataataaaacaccaagaacatgaggatggagagaagtatcagcacccagaagagaaaaaggaatttaaaacaaaaaccacagaggcggaaataccggagggctttgccttgcgaaaagggttggacatcatctcctgatttttcaatgttattcttcagtcctatttaaaaacaaaaccaagctcccttcccttcctcccccttcccttttttttcggtcagaccttttattttctactcttttcagaggggttttctgtttgtttgggttttgtttcttgctgtgactgaaacaagaaggttattgcagcaaaaatcagtaacaaaaaatagtaacaataccttgcagaggaaaggtgggagagaggaaaaaaggaaattctatagaaatctatatattgggttgtttttttttttgttttttgttttttttttttgggtttttttttttactatatatcttttttttgttgtctctagcctgatcagataggagcacaagcaggggacggaaagagagagacactcaggcggcagcattccctcccagccactgagctgtcgtgccagcaccattcctggtcacgcaaaacagaacccagttagcagcagggagacgagaacaccacacaagacatttttctacagtatttcaggtgcctaccacacaggaaaccttgaagaaaatcagtttctagaagccgctgttacctcttgtttacagtttatatatatatgatagatatgagatatatatataaaaggtactgttaactactgtacaacccgacttcataatggtgctttcaaacagcgagatgagtaaaaacatcagcttccacgttgccttctgcgcaaagggtttcaccaaggatggagaaagggagacagcttgcagatggcgcgttctcacggtgggctcttccccttggtttgtaacgaagtgaaggaggagaacttgggagccaggttctccctgccaaaaagggggctagatgaggtggtcgggcccgtggacagctgagagtgggattcatccagactcatgcaataaccctttgattgttttctaaaaggagactccctcggcaagatggcagagggtacggagtcttcaggcccagtttctcactttagccaattcgagggctccttgtggtgggatcagaactaatccagagtgtgggaaagtgacagtcaaaaccccacctggagcaaataaaaaaacatacaaaacgtactggtgctttcctgtctaagtcgccttttgtgtgttcttttatgaggcccccaccatccacccctctgtgcacaaggcggctcccggcccctggaatgtgatgtttttggtcatctccaaaggctgcagttttatactgggaggctgatgacaccttttattataattattcttatggttctggttataattatgtttgttttaagattttctttaagaaaacaaaaacccaacacccttccctttaggtttcaaaccaaggtgcgggagcagggtgcttctgagttagcggtggctctggtgccctggctcccacccctcgggccaggtgggccactgggcatggtgacagctgggcggccagggagtccccaaggtctgccttctgggcttgtcactcttctcttctacttcccctcctcttgagtcgggtgtgtcagggctggagggaggaccggccgtctctctccttgtgtgtgtgattggagtggtgtgtatttcttttctagtacttggtctgatgatagctgtgctcttacctcgagtcagcagcacctggagccccaagtgctcaacactttgttctacttcctacaaggcaggcggcctggcgtcagtagtaggaagggatggcattgttggctccagggtgagggcccgacgggcaggtgcttgcctgggtagatggggtgtagatatgtggcatatagagatatatattttataatgggaggggggatggcacctcctgggactggtagagctgggaggtgtgtcggcaagcacatggccccaagtccacgtccctagaaagatggggcctacagtgataggcgctctataaatacatagatagggtcatgtttaagaaatattatggggtggggagtgggggaagcaggcttagtgtgctgagcctcggtccccactgcagacctaaaccccacaccaatcagtcaatctcacacgcatacacaggagcatatttctgtactgatgcataatgaatgcactcacacacacacacacacgccagggggctcccagcactcttctcccagggttcaggactttgtggagtcagcccgtgcagctatttacctctgttgccctgattgcaggtagactgtcaatcccagaagttgctaggtgctgaggcaggaaaaggaggaggtttcttttagcaggtgctctcctctagcaggtagtgttctatctcttttgcccctggtgatgtcaaaagattcttctgttagcaacctgtgatactgacctgcaactctaggcaccagtcaagtcagccctcaactccccctacctattctccccaactgaaatcaaattgacatccaggtctgtcttggccagggggcttccattggggaaaaaaaatgggacagtgaacctcacctattgaataaaccaaattagtaattagtgacaaaaccaaaccaaggctttggaccccctgctcattactcaggagtaaattcacacagctggtggccggtctcacccctttttggggtgcttggtcctggaccccaatctactgtctcctcgacagattggtgtttaagatcatgcccagttgcttcctgtcacctcttgacaggtggtgactgggctgctgtggggctggagcagcgaggaagggagcctctgccccctcagtggagtccctgtgctaactgtggtgctcacccagctcctccttgctcccgcggggctctgtccttcgggcctggagtccaccagcgccactccaggagggctgggggaggaggggctgcctcaggcagtccaaggtgctccctcccccgctggccaatgctaaggtcttcccggctcccagggtcaggacagagtcttctaaggctcaggctctcccaagccactgcttagtgacagttagcctttcccagcggcccaagctccaccggaactgggcctggtgctccaaccaaagggttggtgttgggacttgggaagagacttggtagccaagggcatggcaagcctgggggattcctgtgggccggcttgctcgaggagggagtgctgggcacagaggagcccttatggctgacagcttgagagcacttgttcctccagatctagccacttgaccaggccctagaatggaccagatgccccaggggtcatggcccccccccccccccccttgcagggacgagagttaacaatcaccagcttttcttccggcccagcctgtgtgcttggtctcacagtagaatttaggagagtgtggggctttgggattgtgccaacttggccaagctgagatatgcttaatccacctcaacgctggggcctctggggacaggtattgggtcaccttccaaggggtgctgaacttcagcaggctgtagataaggcagaggttagaggcagtggagtgggggaaccaagaaggcctagggaaaattgccaggcatattccctgtggaattttctttccgaagagtaggcccatttcccccttagaaacaagggttctgggggctgatgacagcttcccctgcaggtgccaggtggcgcatgatgccaaagagatccgtggctcttgcctgggggaggtagccaggtgctcgtgctggggacacagtccttggcctcctgcctaagcaggaagctagtttccagcaggcggctggtactaaccccccgccccacgggagcgacaggctggtgcaccggcagactggggggccgcaggcgggcactagcaggggtctgcagtccatagatgatgacatgaatctgttgctgtccttttgtctctaggccccagagacttcttgctattgaacatcctattggaaagcaaactttccaagagagcacccgggacctgttagcttttgaaacaggcctgggtgtgattgactggtagagatgcctgtgtgatttttggcgcattgcaggagtgtggattgggacaggcaccccagcaggaaggaaggctgacaccaaaggggtctcacagggcccagctccccttgcttcccgataattggccaccaggccatggcgactctggggaagcctagatgggaacacccaccttctccagcagtagaaggaatatttcagcagagccatctgggagatgttcttataggaaaactgcagtcattcatttcatagttttgcttatataaatagagtacatttgggaggcagttttgaattcctgttgctactctgcttggtgcggagttgcagtggccccaagtgtctttcagagctgttgcttttaggatccccctcaagctgtgggttagggccagggcagggagggggtgctgcctggcactgtgccctgaagagggctgcttgcttcctttggtcgggagcacggcagagccaacattctggtgggaaccgagtttctagccaggcccctgttttggtcccgggaggtgagtaatctgagtttgtcattgcgtattctccacgctgcctgctctcagtgctggagactagagagcgaccctggagttgtcctctgggagtcctgcctgtttgccagggagcagctgaaacctccccgctcccaatcccgggggtggaaaaggtgtagtggaggaatggtctggagctgggatggcccttctggccatgccctgctgagccaggattaaggaaagtgtcagccgcctccttaccaggccctgtgctggggtcaggaggaccgggaggagagggaaggggtgagaggatggactctgctgttgtagtgtgagctctggaatctttacgttttggtaaaggcaggccagggtctttgaggatcgagttggggaaccttgcctctgtgtttccgagacccagctaaggtgggcctttggtgggtgacctgtctctgacccgaggcagcagagttttgggggagggagaaacaagcaaggagcagggaggacaaggacacaagatccctttgctggtggtgacttactcacttcccccaccagagggcctgggactcccgaaactcccgtaactggaaagctccctggctcagctccactggggggtgaggagggcggctccctcagccccagcctagcggcctccaaccctgtgcctgagaacatgagcagcggtctaaagcatcccctagtcccatttcacttcacagaccgatttggttgcacagccctagaattcaacagacaacaaaaatgctgaaattccttagaatacgcagagggaggaggtgactcaccaaggtgctaaaacattttattaaaaatatatattgttaaattaagtctgctgtctggacaatgactgtttgttttgttttcttgtagtggagtttaaaagagactattattttactctgatatattattattaaaaaggcattttaactttgtacttgaaaactaaatgagcgatttcatgtgttttagctgaggcattgaagtagcgggtgcttacttatttgtgggaaatcatgtattcatactgaagaataaactccgtagctgatttggtaataacttttactgttacagacgatttcgctttgaccccggtggcagagcacttttactccacattccacgcagctaaatgcaggacttcccagactcttccctccccagccctctttcctttctcttaagttcctcttttctcctttattattattatttttttttcctggttccagcatcctttcaccactgtattttttttttttttttttttttttttttttttttttttttttttttttttttagggttgcttctctatttattgacaataataatgtacatttcacagtctggttctaggacattcagggaagggcgagtgggggcccgaggggtccctgccccacccgcctggtgtcctgttgtatctctgtgtaagtgatgctcgtgacatagctgtttatgaaataattaaagaggtcaatgcgtacaacagatgtagaaagtctgtcagttccgccttcatcacatttttttttgtgcccagaagaatataataaagctcctttctaatgtacttgtgctggagaacacttgaataaatggactgtttttgtgcaaaaagaaaaa

SEQ ID NO: 237 - DNA, 1775 bp, Homo sapiens
  source 1..1775: mol_type = genomic DNA
gcagtgggctctggcggaggtcgggagaactgcagggcgaaggccgccgggggctccgcgggctgcggggggaggcacttgacaccggcccggggagaggaggggccgctgtccctgcggccagtgctggatgcggggacccagcgcagaagcagcgccaggtggagccatcgaagcccccacccacaggctgacagaggcaccgttcaccagagggctcaacaccgggatctatgtttaagttttaactctcgcctccaaagaccacgataattccttccccaaagcccagcagccccccagccccgcgcagccccagcctgcctcccggcgcccagatgcccgccatgccctccagcggccccggggacaccagcagctctgctgcggagcgggaggaggaccgaaaggacggagaggagcaggaggagccgcgtggcaaggaggagcgccaagagcccagcaccacggcacggaaggtggggcggcctgggaggaagcgcaagcaccccccggtggaaagcggtgacacgccaaaggaccctgcggtgatctccaagtccccatccatggcccaggactcaggcgcctcagagctattacccaatggggacttggagaagcggagtgagccccagccagaggaggggagccctgctggggggcagaagggcggggccccagcagagggagagggtgcagctgagaccctgcctgaagcctcaagagcagtggaaaatggctgctgcacccccaaggagggccgaggagcccctgcagaagcgggtgagtcctcagcaccaggggcagcctcttctgggcccaccagcataccctgagagtcagggacttggctctccagcaggtcccaggaaggatggtctgggtcgtggctaaaggtctgcttgccaaggctatggcctggaggctactggctggatgcagcctgcgcatatgttttatttggcccatagagtgttttaaacatttaaaaaattagttgccagtatttaaaaatcaaaaaatttcacataaaaatctggagttttggcttctcatgaaaaaaaaaaaagctagatctggcaacagcgggctttcataacgccaacgattgctagactgggataatggcggtccctccatcgccttctgtggctggttgtgggccttagttttctgcagctctacctggcctgcttactctcccacgtgccatgcagttcctgggggttgctgtatttgtagcccctggcctgggcactcaagggcagcagataccctgtttgcctccctgagtgcagaggtcctgagcccaccctagttgggctgactcaactggaaatttggttgtgacagtggcgtggggagagggctgggtgattgtattctgtgtactgcccagcccaggcctcttcatctggggactttttggcctaaccctggaagcctggaaagttgcccacttttctctttcaggttaagccagcaatttcagggccaaccgagctgtaaacatgttagtaatgaggacaactagcatttgtacagggcttcacagtttacaaagcgctttctcatacattatcacatttgatcctcccagggccctgccaggttgttttgcatatgtgcattttaatttcaaaaagtcttccttccaagcgtgtatgatgaaatgagtaaattgattaattggcgtaacttattttgcatggatccaacctaatgttcatgcaggatagagaacatttccagaatacaaatttccaaactta

SEQ ID NO: 238 - DNA, 3589 bp, Homo sapiens
  source 1..3589: mol_type = genomic DNA
ccgcccccagccccatcgcccccttcccctcccccaagacgggcagctacttccagagcttcagggccgcggctcacacctgagcgcgactgcagaggggctgcacctggccttatggggatcctggagcgggttgtgagaaggaatgggcgcgtggatcgtagcctgaaagacgagtgtgatacggctgagaagaaagccaaggtcattgcaggaatgaatgctgtggaagaaaaccaggggcccggggagtctcagaaggtggaggaggccagccctcctgctgtgcagcagcccactgaccccgcatcccccactgtggctaccacgcctgagcccgtggggtccgatgctggggacaagaatgccaccaaagcaggcgatgacgagccagagtacgaggacggccggggctttggcattggggagctggtgtgggggaaactgcggggcttctcctggtggccaggccgcattgtgtcttggtggatgacgggccggagccgagcagctgaaggcacccgctgggtcatgtggttcggagacggcaaattctcagtggtgtgtgttgagaagctgatgccgctgagctcgttttgcagtgcgttccaccaggccacgtacaacaagcagcccatgtaccgcaaagccatctacgaggtcctgcaggtggccagcagccgcgcggggaagctgttcccggtgtgccacgacagcgatgagagtgacactgccaaggccgtggaggtgcagaacaagcccatgattgaatgggccctggggggcttccagccttctggccctaagggcctggagccaccagaagaagagaagaatccctacaaagaagtgtacacggacatgtgggtggaacctgaggcagctgcctacgcaccacctccaccagccaaaaagccccggaagagcacagcggagaagcccaaggtcaaggagattattgatgagcgcacaagagagcggctggtgtacgaggtgcggcagaagtgccggaacattgaggacatctgcatctcctgtgggagcctcaatgttaccctggaacaccccctcttcgttggaggaatgtgccaaaactgcaagaactgctttctggagtgtgcgtaccagtacgacgacgacggctaccagtcctactgcaccatctgctgtgggggccgtgaggtgctcatgtgcggaaacaacaactgctgcaggtgcttttgcgtggagtgtgtggacctcttggtggggccgggggctgcccaggcagccattaaggaagacccctggaactgctacatgtgcgggcacaagggtacctacgggctgctgcggcggcgagaggactggccctcccggctccagatgttcttcgctaataaccacgaccaggaatttgaccctccaaaggtttacccacctgtcccagctgagaagaggaagcccatccgggtgctgtctctctttgatggaatcgctacagggctcctggtgctgaaggacttgggcattcaggtggaccgctacattgcctcggaggtgtgtgaggactccatcacggtgggcatggtgcggcaccaggggaagatcatgtacgtcggggacgtccgcagcgtcacacagaagcatatccaggagtggggcccattcgatctggtgattgggggcagtccctgcaatgacctctccatcgtcaaccctgctcgcaagggcctctacgagggcactggccggctcttctttgagttctaccgcctcctgcatgatgcgcggcccaaggagggagatgatcgccccttcttctggctctttgagaatgtggtggccatgggcgttagtgacaagagggacatctcgcgatttctcgagtccaaccctgtgatgattgatgccaaagaagtgtcagctgcacacagggcccgctacttctggggtaaccttcccggtatgaacaggccgttggcatccactgtgaatgataagctggagctgcaggagtgtctggagcatggcaggatagccaagttcagcaaagtgaggaccattactacgaggtcaaactccataaagcagggcaaagaccagcattttcctgtcttcatgaatgagaaagaggacatcttatggtgcactgaaatggaaagggtatttggtttcccagtccactatactgacgtctccaacatgagccgcttggcgaggcagagactgctgggccggtcatggagcgtgccagtcatccgccacctcttcgctccgctgaaggagtattttgcgtgtgtgtaagggacatgggggcaaactgaggtagcgacacaaagttaaacaaacaaacaaaaaacacaaaacataataaaacaccaagaacatgaggatggagagaagtatcagcacccagaagagaaaaaggaatttaaaacaaaaaccacagaggcggaaataccggagggctttgccttgcgaaaagggttggacatcatctcctgatttttcaatgttattcttcagtcctatttaaaaacaaaaccaagctcccttcccttcctcccccttcccttttttttcggtcagaccttttattttctactcttttcagaggggttttctgtttgtttgggttttgtttcttgctgtgactgaaacaagaaggttattgcagcaaaaatcagtaacaaaaaatagtaacaataccttgcagaggaaaggtgggagagaggaaaaaaggaaattctatagaaatctatatattgggttgtttttttttttgttttttgttttttttttttgggtttttttttttactatatatcttttttttgttgtctctagcctgatcagataggagcacaagcaggggacggaaagagagagacactcaggcggcagcattccctcccagccactgagctgtcgtgccagcaccattcctggtcacgcaaaacagaacccagttagcagcagggagacgagaacaccacacaagacatttttctacagtatttcaggtgcctaccacacaggaaaccttgaagaaaatcagtttctagaagccgctgttacctcttgtttacagtttatatatatatgatagatatgagatatatatataaaaggtactgttaactactgtacaacccgacttcataatggtgctttcaaacagcgagatgagtaaaaacatcagcttccacgttgccttctgcgcaaagggtttcaccaaggatggagaaagggagacagcttgcagatggcgcgttctcacggtgggctcttccccttggtttgtaacgaagtgaaggaggagaacttgggagccaggttctccctgccaaaaagggggctagatgaggtggtcgggcccgtggacagctgagagtgggattcatccagactcatgcaataaccctttgattgttttctaaaaggagactccctcggcaagatggcagagggtacggagtcttcaggcccagtttctcactttagccaattcgagggctccttgtggtgggatcagaactaatccagagtgtgggaaagtgacagtcaaaaccccacctggagcaaataaaaaaacatacaaaacgta

SEQ ID NO: 239 - DNA, 2300 bp, Homo sapiens
  source 1..2300: mol_type = genomic DNA
ccgcccccagccccatcgcccccttcccctcccccaagacgggcagctacttccagagcttcagggccgcggctcacacctgagcgcgactgcagaggggctgcacctggccttatgggctgagaagaaagccaaggtcattgcaggaatgaatgctgtggaagaaaaccaggggcccggggagtctcagaaggtggaggaggccagccctcctgctgtgcagcagcccactgaccccgcatcccccactgtggctaccacgcctgagcccgtggggtccgatgctggggacaagaatgccaccaaagcaggcgatgacgagccagagtacgaggacggccggggctttggcattggggagctggtgtgggggaaactgcggggcttctcctggtggccaggccgcattgtgtcttggtggatgacgggccggagccgagcagctgaaggcacccgctgggtcatgtggttcggagacggcaaattctcagtggtgtgtgttgagaagctgatgccgctgagctcgttttgcagtgcgttccaccaggccacgtacaacaagcagcccatgtaccgcaaagccatctacgaggtcctgcaggtggccagcagccgcgcggggaagctgttcccggtgtgccacgacagcgatgagagtgacactgccaaggccgtggaggtgcagaacaagcccatgattgaatgggccctggggggcttccagccttctggccctaagggcctggagccaccagaagaagagaagaatccctacaaagaagtgtacacggacatgtgggtggaacctgaggcagctgcctacgcaccacctccaccagccaaaaagccccggaagagcacagcggagaagcccaaggtcaaggagattattgatgagcgcacaagagagcggctggtgtacgaggtgcggcagaagtgccggaacattgaggacatctgcatctcctgtgggagcctcaatgttaccctggaacaccccctcttcgttggaggaatgtgccaaaactgcaagaactgctttctggagtgtgcgtaccagtacgacgacgacggctaccagtcctactgcaccatctgctgtgggggccgtgaggtgctcatgtgcggaaacaacaactgctgcaggtgcttttgcgtggagtgtgtggacctcttggtggggccgggggctgcccaggcagccattaaggaagacccctggaactgctacatgtgcgggcacaagggtacctacgggctgctgcggcggcgagaggactggccctcccggctccagatgttcttcgctaataaccacgaccaggaatttgaccctccaaaggtttacccacctgtcccagctgagaagaggaagcccatccgggtgctgtctctctttgatggaatcgctacagggctcctggtgctgaaggacttgggcattcaggtggaccgctacattgcctcggaggtgtgtgaggactccatcacggtgggcatggtgcggcaccaggggaagatcatgtacgtcggggacgtccgcagcgtcacacagaagcatatccaggagtggggcccattcgatctggtgattgggggcagtccctgcaatgacctctccatcgtcaaccctgctcgcaagggcctctacgagggcactggccggctcttctttgagttctaccgcctcctgcatgatgcgcggcccaaggagggagatgatcgccccttcttctggctctttgagaatgtggtggccatgggcgttagtgacaagagggacatctcgcgatttctcgagtccaaccctgtgatgattgatgccaaagaagtgtcagctgcacacagggcccgctacttctggggtaaccttcccggtatgaacaggccgttggcatccactgtgaatgataagctggagctgcaggagtgtctggagcatggcaggatagccaagttcagcaaagtgaggaccattactacgaggtcaaactccataaagcagggcaaagaccagcattttcctgtcttcatgaatgagaaagaggacatcttatggtgcactgaaatggaaagggtatttggtttcccagtccactatactgacgtctccaacatgagccgcttggcgaggcagagactgctgggccggtcatggagcgtgccagtcatccgccacctcttcgctccgctgaaggagtattttgcgtgtgtgtaagggacatgggggcaaactgaggtagcgacacaaagttaaacaaacaaacaaaaaacacaaaacataataaaacaccaagaac

SEQ ID NO: 240 - DNA, 4395 bp, Homo sapiens
  source 1..4395: mol_type = genomic DNA
gcagtgggctctggcggaggtcgggagaactgcagggcgaaggccgccgggggctccgcgggctgcggggggaggcacttgacaccggcccggggagaggaggggccgctgtccctgcggccagtgctggatgcggggacccagcgcagaagcagcgccaggtggagccatcgaagcccccacccacaggctgacagaggcaccgttcaccagagggctcaacaccgggatctatgtttaagttttaactctcgcctccaaagaccacgataattccttccccaaagcccagcagccccccagccccgcgcagccccagcctgcctcccggcgcccagatgcccgccatgccctccagcggccccggggacaccagcagctctgctgcggagcgggaggaggaccgaaaggacggagaggagcaggaggagccgcgtggcaaggaggagcgccaagagcccagcaccacggcacggaaggtggggcggcctgggaggaagcgcaagcaccccccggtggaaagcggtgacacgccaaaggaccctgcggtgatctccaagtccccatccatggcccaggactcaggcgcctcagagctattacccaatggggacttggagaagcggagtgagccccagccagaggaggggagccctgctggggggcagaagggcggggccccagcagagggagagggtgcagctgagaccctgcctgaagcctcaagagcagtggaaaatggctgctgcacccccaaggagggccgaggagcccctgcagaagcgggcaaagaacagaaggagaccaacatcgaatccatgaaaatggagggctcccggggccggctgcggggtggcttgggctgggagtccagcctccgtcagcggcccatgccgaggctcaccttccaggcgggggacccctactacatcagcaagcgcaagcgggacgagtggctggcacgctggaaaagggaggctgagaagaaagccaaggtcattgcaggaatgaatgctgtggaagaaaaccaggggcccggggagtctcagaaggtggaggaggccagccctcctgctgtgcagcagcccactgaccccgcatcccccactgtggctaccacgcctgagcccgtggggtccgatgctggggacaagaatgccaccaaagcaggcgatgacgagccagagtacgaggacggccggggctttggcattggggagctggtgtgggggaaactgcggggcttctcctggtggccaggccgcattgtgtcttggtggatgacgggccggagccgagcagctgaaggcacccgctgggtcatgtggttcggagacggcaaattctcagtggtgtgtgttgagaagctgatgccgctgagctcgttttgcagtgcgttccaccaggccacgtacaacaagcagcccatgtaccgcaaagccatctacgaggtcctgcaggtggccagcagccgcgcggggaagctgttcccggtgtgccacgacagcgatgagagtgacactgccaaggccgtggaggtgcagaacaagcccatgattgaatgggccctggggggcttccagccttctggccctaagggcctggagccaccagaagaagagaagaatccctacaaagaagtgtacacggacatgtgggtggaacctgaggcagctgcctacgcaccacctccaccagccaaaaagccccggaagagcacagcggagaagcccaaggtcaaggagattattgatgagcgcacaagagagcggctggtgtacgaggtgcggcagaagtgccggaacattgaggacatctgcatctcctgtgggagcctcaatgttaccctggaacaccccctcttcgttggaggaatgtgccaaaactgcaagaactgctttctggagtgtgcgtaccagtacgacgacgacggctaccagtcctactgcaccatctgctgtgggggccgtgaggtgctcatgtgcggaaacaacaactgctgcaggtgcttttgcgtggagtgtgtggacctcttggtggggccgggggctgcccaggcagccattaaggaagacccctggaactgctacatgtgcgggcacaagggtacctacgggctgctgcggcggcgagaggactggccctcccggctccagatgttcttcgctaataaccacgaccaggaatttgaccctccaaaggtttacccacctgtcccagctgagaagaggaagcccatccgggtgctgtctctctttgatggaatcgctacagggctcctggtgctgaaggacttgggcattcaggtggaccgctacattgcctcggaggtgtgtgaggactccatcacggtgggcatggtgcggcaccaggggaagatcatgtacgtcggggacgtccgcagcgtcacacagaagcatatccaggagtggggcccattcgatctggtgattgggggcagtccctgcaatgacctctccatcgtcaaccctgctcgcaagggcctctacgagggcactggccggctcttctttgagttctaccgcctcctgcatgatgcgcggcccaaggagggagatgatcgccccttcttctggctctttgagaatgtggtggccatgggcgttagtgacaagagggacatctcgcgatttctcgagtccaaccctgtgatgattgatgccaaagaagtgtcagctgcacacagggcccgctacttctggggtaaccttcccggtatgaacaggccgttggcatccactgtgaatgataagctggagctgcaggagtgtctggagcatggcaggatagccaagttcagcaaagtgaggaccattactacgaggtcaaactccataaagcagggcaaagaccagcattttcctgtcttcatgaatgagaaagaggacatcttatggtgcactgaaatggaaagggtatttggtttcccagtccactatactgacgtctccaacatgagccgcttggcgaggcagagactgctgggccggtcatggagcgtgccagtcatccgccacctcttcgctccgctgaaggagtattttgcgtgtgtgtaagggacatgggggcaaactgaggtagcgacacaaagttaaacaaacaaacaaaaaacacaaaacataataaaacaccaagaacatgaggatggagagaagtatcagcacccagaagagaaaaaggaatttaaaacaaaaaccacagaggcggaaataccggagggctttgccttgcgaaaagggttggacatcatctcctgatttttcaatgttattcttcagtcctatttaaaaacaaaaccaagctcccttcccttcctcccccttcccttttttttcggtcagaccttttattttctactcttttcagaggggttttctgtttgtttgggttttgtttcttgctgtgactgaaacaagaaggttattgcagcaaaaatcagtaacaaaaaatagtaacaataccttgcagaggaaaggtgggagagaggaaaaaaggaaattctatagaaatctatatattgggttgtttttttttttgttttttgttttttttttttgggtttttttttttactatatatcttttttttgttgtctctagcctgatcagataggagcacaagcaggggacggaaagagagagacactcaggcggcagcattccctcccagccactgagctgtcgtgccagcaccattcctggtcacgcaaaacagaacccagttagcagcagggagacgagaacaccacacaagacatttttctacagtatttcaggtgcctaccacacaggaaaccttgaagaaaatcagtttctagaagccgctgttacctcttgtttacagtttatatatatatgatagatatgagatatatatataaaaggtactgttaactactgtacaacccgacttcataatggtgctttcaaacagcgagatgagtaaaaacatcagcttccacgttgccttctgcgcaaagggtttcaccaaggatggagaaagggagacagcttgcagatggcgcgttctcacggtgggctcttccccttggtttgtaacgaagtgaaggaggagaacttgggagccaggttctccctgccaaaaagggggctagatgaggtggtcgggcccgtggacagctgagagtgggattcatccagactcatgcaataaccctttgattgttttctaaaaggagactccctcggcaagatggcagagggtacggagtcttcaggcccagtttctcactttagccaattcgagggctccttgtggtgggatcagaactaatccagagtgtgggaaagtgacagtcaaaaccccacctggagcaaataaaaaaacatacaaaacgtactggtgctttcctgt

SEQ ID NO: 241 - DNA, 1714 bp, Homo sapiens
  source 1..1714: mol_type = genomic DNA
gcgcgggcggcggcggcggcgagagcagaggacgagccgggacgcggcgccgcggcaccagggcgcgcagccgggccggcccgaccccaccggccatacggtggagccatcgaagcccccacccacaggctgacagaggcaccgttcaccagagggctcaacaccgggatctatgtttaagttttaactctcgcctccaaagaccacgataattccttccccaaagcccagcagccccccagccccgcgcagccccagcctgcctcccggcgcccagatgcccgccatgccctccagcggccccggggacaccagcagctctgctgcggagcgggaggaggaccgaaaggacggagaggagcaggaggagccgcgtggcaaggaggagcgccaagagcccagcaccacggcacggaaggtggggcggcctgggaggaagcgcaagcaccccccggtggaaagcggtgacacgccaaaggaccctgcggtgatctccaagtccccatccatggcccaggactcaggcgcctcagagctattacccaatggggacttggagaagcggagtgagccccagccagaggaggggagccctgctggggggcagaagggcggggccccagcagagggagagggtgcagctgagaccctgcctgaagcctcaagagcagtggaaaatggctgctgcacccccaaggagggccgaggagcccctgcagaagcgggtgagtcctcagcaccaggggcagcctcttctgggcccaccagcataccctgagagtcagggacttggctctccagcaggtcccaggaaggatggtctgggtcgtggctaaaggtctgcttgccaaggctatggcctggaggctactggctggatgcagcctgcgcatatgttttatttggcccatagagtgttttaaacatttaaaaaattagttgccagtatttaaaaatcaaaaaatttcacataaaaatctggagttttggcttctcatgaaaaaaaaaaaagctagatctggcaacagcgggctttcataacgccaacgattgctagactgggataatggcggtccctccatcgccttctgtggctggttgtgggccttagttttctgcagctctacctggcctgcttactctcccacgtgccatgcagttcctgggggttgctgtatttgtagcccctggcctgggcactcaagggcagcagataccctgtttgcctccctgagtgcagaggtcctgagcccaccctagttgggctgactcaactggaaatttggttgtgacagtggcgtggggagagggctgggtgattgtattctgtgtactgcccagcccaggcctcttcatctggggactttttggcctaaccctggaagcctggaaagttgcccacttttctctttcaggttaagccagcaatttcagggccaaccgagctgtaaacatgttagtaatgaggacaactagcatttgtacagggcttcacagtttacaaagcgctttctcatacattatcacatttgatcctcccagggccctgccaggttgttttgcatatgtgcattttaatttcaaaaagtcttccttccaagcgtgtatgatgaaatgagtaaattgattaattggcgtaacttattttgcatggatccaacctaatgttcatgcaggatagagaacatttccagaatacaaatttccaaactta

SEQ ID NO: 242 - DNA, 1808 bp, Homo sapiens
  source 1..1808: mol_type = genomic DNA
gcagtgggctctggcggaggtcgggagaactgcagggcgaaggccgccgggggctccgcgggctgcggggggaggcacttgacaccggcccggggagaggaggggccgctgtccctgcggccagtgctggatgcggggacccagcgcagaagcagcgccaggtggagccatcgaagcccccacccacaggctgacagaggcaccgttcaccagagggctcaacaccgggatctatgtttaagttttaactctcgcctccaaagaccacgataattccttccccaaagcccagcagccccccagccccgcgcagccccagcctgcctcccggcgcccagatgcccgccatgccctccagcggccccggggacaccagcagctctgctgcggagcgggaggaggaccgaaaggacggagaggagcaggaggagccgcgtggcaaggaggagcgccaagagcccagcaccacggcacggaaggtggggcggcctgggaggaagcgcaagcaccccccggtggaaagcggtgacacgccaaaggaccctgcggtgatctccaagtccccatccatggcccaggactcaggcgcctcagagctattacccaatggggacttggagaagcggagtgagccccagccagaggaggggagccctgctggggggcagaagggcggggccccagcagagggagagggtgcagctgagaccctgcctgaagcctcaagagcagtggaaaatggctgctgcacccccaaggagggccgaggagcccctgcagaagcgggtgagtcctcagcaccaggggcagcctcttctgggcccaccagcataccctgagagtcagggacttggctctccagcaggtcccaggaaggatggtctgggtcgtggctaaaggtctgcttgccaaggctatggcctggaggctactggctggatgcagcctgcgcatatgttttatttggcccatagagtgttttaaacatttaaaaaattagttgccagtatttaaaaatcaaaaaatttcacataaaaatctggagttttggcttctcatgaaaaaaaaaaaagctagatctggcaacagcgggctttcataacgccaacgattgctagactgggataatggcggtccctccatcgccttctgtggctggttgtgggccttagttttctgcagctctacctggcctgcttactctcccacgtgccatgcagttcctgggggttgctgtatttgtagcccctggcctgggcactcaagggcagcagataccctgtttgcctccctgagtgcagaggtcctgagcccaccctagttgggctgactcaactggaaatttggttgtgacagtggcgtggggagagggctgggtgattgtattctgtgtactgcccagcccaggcctcttcatctggggactttttggcctaaccctggaagcctggaaagttgcccacttttctctttcaggttaagccagcaatttcagggccaaccgagctgtaaacatgttagtaatgaggacaactagcatttgtacagggcttcacagtttacaaagcgctttctcatacattatcacatttgatcctcccagggccctgccaggttgttttgcatatgtgcattttaatttcaaaaagtcttccttccaagcgtgtatgatgaaatgagtaaattgattaattggcgtaacttattttgcatggatccaacctaatgttcatgcaggatagagaacatttccagaatacaaatttccaaacttaaaaaaaaaaaaaaaaaaaaaaaaaaaaaaaaaa

SEQ ID NO: 243 - DNA, 3638 bp, Homo sapiens
  source 1..3638: mol_type = genomic DNA
gatctccgcagccctccgggtttgaaaagagtgaagtatgcctccccggcccgcagcagccgcggcgtcccggcctggcccgagttctggagatgctgacttagtgctggcccgccgccttcctgcccacgagccccaaggccccactcctcgagggctccagtggcacctggcgccctcgggggacaggaagagcagccggccgggagcccgggcagtggctgagaagaaagccaaggtcattgcaggaatgaatgctgtggaagaaaaccaggggcccggggagtctcagaaggtggaggaggccagccctcctgctgtgcagcagcccactgaccccgcatcccccactgtggctaccacgcctgagcccgtggggtccgatgctggggacaagaatgccaccaaagcaggcgatgacgagccagagtacgaggacggccggggctttggcattggggagctggtgtgggggaaactgcggggcttctcctggtggccaggccgcattgtgtcttggtggatgacgggccggagccgagcagctgaaggcacccgctgggtcatgtggttcggagacggcaaattctcagtggtgtgtgttgagaagctgatgccgctgagctcgttttgcagtgcgttccaccaggccacgtacaacaagcagcccatgtaccgcaaagccatctacgaggtcctgcaggtggccagcagccgcgcggggaagctgttcccggtgtgccacgacagcgatgagagtgacactgccaaggccgtggaggtgcagaacaagcccatgattgaatgggccctggggggcttccagccttctggccctaagggcctggagccaccagaagaagagaagaatccctacaaagaagtgtacacggacatgtgggtggaacctgaggcagctgcctacgcaccacctccaccagccaaaaagccccggaagagcacagcggagaagcccaaggtcaaggagattattgatgagcgcacaagagagcggctggtgtacgaggtgcggcagaagtgccggaacattgaggacatctgcatctcctgtgggagcctcaatgttaccctggaacaccccctcttcgttggaggaatgtgccaaaactgcaagaactgctttctggagtgtgcgtaccagtacgacgacgacggctaccagtcctactgcaccatctgctgtgggggccgtgaggtgctcatgtgcggaaacaacaactgctgcaggtgcttttgcgtggagtgtgtggacctcttggtggggccgggggctgcccaggcagccattaaggaagacccctggaactgctacatgtgcgggcacaagggtacctacgggctgctgcggcggcgagaggactggccctcccggctccagatgttcttcgctaataaccacgaccaggaatttgaccctccaaaggtttacccacctgtcccagctgagaagaggaagcccatccgggtgctgtctctctttgatggaatcgctacagggctcctggtgctgaaggacttgggcattcaggtggaccgctacattgcctcggaggtgtgtgaggactccatcacggtgggcatggtgcggcaccaggggaagatcatgtacgtcggggacgtccgcagcgtcacacagaagcatatccaggagtggggcccattcgatctggtgattgggggcagtccctgcaatgacctctccatcgtcaaccctgctcgcaagggcctctacgagggcactggccggctcttctttgagttctaccgcctcctgcatgatgcgcggcccaaggagggagatgatcgccccttcttctggctctttgagaatgtggtggccatgggcgttagtgacaagagggacatctcgcgatttctcgagtccaaccctgtgatgattgatgccaaagaagtgtcagctgcacacagggcccgctacttctggggtaaccttcccggtatgaacaggccgttggcatccactgtgaatgataagctggagctgcaggagtgtctggagcatggcaggatagccaagttcagcaaagtgaggaccattactacgaggtcaaactccataaagcagggcaaagaccagcattttcctgtcttcatgaatgagaaagaggacatcttatggtgcactgaaatggaaagggtatttggtttcccagtccactatactgacgtctccaacatgagccgcttggcgaggcagagactgctgggccggtcatggagcgtgccagtcatccgccacctcttcgctccgctgaaggagtattttgcgtgtgtgtaagggacatgggggcaaactgaggtagcgacacaaagttaaacaaacaaacaaaaaacacaaaacataataaaacaccaagaacatgaggatggagagaagtatcagcacccagaagagaaaaaggaatttaaaacaaaaaccacagaggcggaaataccggagggctttgccttgcgaaaagggttggacatcatctcctgatttttcaatgttattcttcagtcctatttaaaaacaaaaccaagctcccttcccttcctcccccttcccttttttttcggtcagaccttttattttctactcttttcagaggggttttctgtttgtttgggttttgtttcttgctgtgactgaaacaagaaggttattgcagcaaaaatcagtaacaaaaaatagtaacaataccttgcagaggaaaggtgggagagaggaaaaaaggaaattctatagaaatctatatattgggttgtttttttttttgttttttgttttttttttttgggtttttttttttactatatatcttttttttgttgtctctagcctgatcagataggagcacaagcaggggacggaaagagagagacactcaggcggcagcattccctcccagccactgagctgtcgtgccagcaccattcctggtcacgcaaaacagaacccagttagcagcagggagacgagaacaccacacaagacatttttctacagtatttcaggtgcctaccacacaggaaaccttgaagaaaatcagtttctagaagccgctgttacctcttgtttacagtttatatatatatgatagatatgagatatatatataaaaggtactgttaactactgtacaacccgacttcataatggtgctttcaaacagcgagatgagtaaaaacatcagcttccacgttgccttctgcgcaaagggtttcaccaaggatggagaaagggagacagcttgcagatggcgcgttctcacggtgggctcttccccttggtttgtaacgaagtgaaggaggagaacttgggagccaggttctccctgccaaaaagggggctagatgaggtggtcgggcccgtggacagctgagagtgggattcatccagactcatgcaataaccctttgattgttttctaaaaggagactccctcggcaagatggcagagggtacggagtcttcaggcccagtttctcactttagccaattcgagggctccttgtggtgggatcagaactaatccagagtgtgggaaagtgacagtcaaaaccccacctggagcaaataaaaaaacatacaaaacgtactggtgctttcctgt

SEQ ID NO: 244 - DNA, 3608 bp, Homo sapiens
  source 1..3608: mol_type = genomic DNA
ccctccgcccccagccccatcgcccccttcccctcccccaagacgggcagctacttccagagcttcagggccgcggctcacacctgagcgcgactgcagaggggctgcacctggccttatggggatcctggagcgggttgtgagaaggaatgggcgcgtggatcgtagcctgaaagacgagtgtgatacggctgagaagaaagccaaggtcattgcaggaatgaatgctgtggaagaaaaccaggggcccggggagtctcagaaggtggaggaggccagccctcctgctgtgcagcagcccactgaccccgcatcccccactgtggctaccacgcctgagcccgtggggtccgatgctggggacaagaatgccaccaaagcaggcgatgacgagccagagtacgaggacggccggggctttggcattggggagctggtgtgggggaaactgcggggcttctcctggtggccaggccgcattgtgtcttggtggatgacgggccggagccgagcagctgaaggcacccgctgggtcatgtggttcggagacggcaaattctcagtggtgtgtgttgagaagctgatgccgctgagctcgttttgcagtgcgttccaccaggccacgtacaacaagcagcccatgtaccgcaaagccatctacgaggtcctgcaggtggccagcagccgcgcggggaagctgttcccggtgtgccacgacagcgatgagagtgacactgccaaggccgtggaggtgcagaacaagcccatgattgaatgggccctggggggcttccagccttctggccctaagggcctggagccaccagaagaagagaagaatccctacaaagaagtgtacacggacatgtgggtggaacctgaggcagctgcctacgcaccacctccaccagccaaaaagccccggaagagcacagcggagaagcccaaggtcaaggagattattgatgagcgcacaagagagcggctggtgtacgaggtgcggcagaagtgccggaacattgaggacatctgcatctcctgtgggagcctcaatgttaccctggaacaccccctcttcgttggaggaatgtgccaaaactgcaagaactgctttctggagtgtgcgtaccagtacgacgacgacggctaccagtcctactgcaccatctgctgtgggggccgtgaggtgctcatgtgcggaaacaacaactgctgcaggtgcttttgcgtggagtgtgtggacctcttggtggggccgggggctgcccaggcagccattaaggaagacccctggaactgctacatgtgcgggcacaagggtacctacgggctgctgcggcggcgagaggactggccctcccggctccagatgttcttcgctaataaccacgaccaggaatttgaccctccaaaggtttacccacctgtcccagctgagaagaggaagcccatccgggtgctgtctctctttgatggaatcgctacagggctcctggtgctgaaggacttgggcattcaggtggaccgctacattgcctcggaggtgtgtgaggactccatcacggtgggcatggtgcggcaccaggggaagatcatgtacgtcggggacgtccgcagcgtcacacagaagcatatccaggagtggggcccattcgatctggtgattgggggcagtccctgcaatgacctctccatcgtcaaccctgctcgcaagggcctctacgagggcactggccggctcttctttgagttctaccgcctcctgcatgatgcgcggcccaaggagggagatgatcgccccttcttctggctctttgagaatgtggtggccatgggcgttagtgacaagagggacatctcgcgatttctcgagtccaaccctgtgatgattgatgccaaagaagtgtcagctgcacacagggcccgctacttctggggtaaccttcccggtatgaacaggccgttggcatccactgtgaatgataagctggagctgcaggagtgtctggagcatggcaggatagccaagttcagcaaagtgaggaccattactacgaggtcaaactccataaagcagggcaaagaccagcattttcctgtcttcatgaatgagaaagaggacatcttatggtgcactgaaatggaaagggtatttggtttcccagtccactatactgacgtctccaacatgagccgcttggcgaggcagagactgctgggccggtcatggagcgtgccagtcatccgccacctcttcgctccgctgaaggagtattttgcgtgtgtgtaagggacatgggggcaaactgaggtagcgacacaaagttaaacaaacaaacaaaaaacacaaaacataataaaacaccaagaacatgaggatggagagaagtatcagcacccagaagagaaaaaggaatttaaaacaaaaaccacagaggcggaaataccggagggctttgccttgcgaaaagggttggacatcatctcctgatttttcaatgttattcttcagtcctatttaaaaacaaaaccaagctcccttcccttcctcccccttcccttttttttcggtcagaccttttattttctactcttttcagaggggttttctgtttgtttgggttttgtttcttgctgtgactgaaacaagaaggttattgcagcaaaaatcagtaacaaaaaatagtaacaataccttgcagaggaaaggtgggagagaggaaaaaaggaaattctatagaaatctatatattgggttgtttttttttttgttttttgttttttttttttgggtttttttttttactatatatcttttttttgttgtctctagcctgatcagataggagcacaagcaggggacggaaagagagagacactcaggcggcagcattccctcccagccactgagctgtcgtgccagcaccattcctggtcacgcaaaacagaacccagttagcagcagggagacgagaacaccacacaagacatttttctacagtatttcaggtgcctaccacacaggaaaccttgaagaaaatcagtttctagaagccgctgttacctcttgtttacagtttatatatatatgatagatatgagatatatatataaaaggtactgttaactactgtacaacccgacttcataatggtgctttcaaacagcgagatgagtaaaaacatcagcttccacgttgccttctgcgcaaagggtttcaccaaggatggagaaagggagacagcttgcagatggcgcgttctcacggtgggctcttccccttggtttgtaacgaagtgaaggaggagaacttgggagccaggttctccctgccaaaaagggggctagatgaggtggtcgggcccgtggacagctgagagtgggattcatccagactcatgcaataaccctttgattgttttctaaaaggagactccctcggcaagatggcagagggtacggagtcttcaggcccagtttctcactttagccaattcgagggctccttgtggtgggatcagaactaatccagagtgtgggaaagtgacagtcaaaaccccacctggagcaaataaaaaaacatacaaaacgtactggtgctttcctgt

SEQ ID NO: 245 - DNA, 3473 bp, Homo sapiens
  source 1..3473: mol_type = genomic DNA
acttccagagcttcagggccgcggctcacacctgagcgcgactgcagaggggctgcacctggccttatgggctgagaagaaagccaaggtcattgcaggaatgaatgctgtggaagaaaaccaggggcccggggagtctcagaaggtggaggaggccagccctcctgctgtgcagcagcccactgaccccgcatcccccactgtggctaccacgcctgagcccgtggggtccgatgctggggacaagaatgccaccaaagcaggcgatgacgagccagagtacgaggacggccggggctttggcattggggagctggtgtgggggaaactgcggggcttctcctggtggccaggccgcattgtgtcttggtggatgacgggccggagccgagcagctgaaggcacccgctgggtcatgtggttcggagacggcaaattctcagtggtgtgtgttgagaagctgatgccgctgagctcgttttgcagtgcgttccaccaggccacgtacaacaagcagcccatgtaccgcaaagccatctacgaggtcctgcaggtggccagcagccgcgcggggaagctgttcccggtgtgccacgacagcgatgagagtgacactgccaaggccgtggaggtgcagaacaagcccatgattgaatgggccctggggggcttccagccttctggccctaagggcctggagccaccagaagaagagaagaatccctacaaagaagtgtacacggacatgtgggtggaacctgaggcagctgcctacgcaccacctccaccagccaaaaagccccggaagagcacagcggagaagcccaaggtcaaggagattattgatgagcgcacaagagagcggctggtgtacgaggtgcggcagaagtgccggaacattgaggacatctgcatctcctgtgggagcctcaatgttaccctggaacaccccctcttcgttggaggaatgtgccaaaactgcaagaactgctttctggagtgtgcgtaccagtacgacgacgacggctaccagtcctactgcaccatctgctgtgggggccgtgaggtgctcatgtgcggaaacaacaactgctgcaggtgcttttgcgtggagtgtgtggacctcttggtggggccgggggctgcccaggcagccattaaggaagacccctggaactgctacatgtgcgggcacaagggtacctacgggctgctgcggcggcgagaggactggccctcccggctccagatgttcttcgctaataaccacgaccaggaatttgaccctccaaaggtttacccacctgtcccagctgagaagaggaagcccatccgggtgctgtctctctttgatggaatcgctacagggctcctggtgctgaaggacttgggcattcaggtggaccgctacattgcctcggaggtgtgtgaggactccatcacggtgggcatggtgcggcaccaggggaagatcatgtacgtcggggacgtccgcagcgtcacacagaagcatatccaggagtggggcccattcgatctggtgattgggggcagtccctgcaatgacctctccatcgtcaaccctgctcgcaagggcctctacgagggcactggccggctcttctttgagttctaccgcctcctgcatgatgcgcggcccaaggagggagatgatcgccccttcttctggctctttgagaatgtggtggccatgggcgttagtgacaagagggacatctcgcgatttctcgagtccaaccctgtgatgattgatgccaaagaagtgtcagctgcacacagggcccgctacttctggggtaaccttcccggtatgaacaggccgttggcatccactgtgaatgataagctggagctgcaggagtgtctggagcatggcaggatagccaagttcagcaaagtgaggaccattactacgaggtcaaactccataaagcagggcaaagaccagcattttcctgtcttcatgaatgagaaagaggacatcttatggtgcactgaaatggaaagggtatttggtttcccagtccactatactgacgtctccaacatgagccgcttggcgaggcagagactgctgggccggtcatggagcgtgccagtcatccgccacctcttcgctccgctgaaggagtattttgcgtgtgtgtaagggacatgggggcaaactgaggtagcgacacaaagttaaacaaacaaacaaaaaacacaaaacataataaaacaccaagaacatgaggatggagagaagtatcagcacccagaagagaaaaaggaatttaaaacaaaaaccacagaggcggaaataccggagggctttgccttgcgaaaagggttggacatcatctcctgatttttcaatgttattcttcagtcctatttaaaaacaaaaccaagctcccttcccttcctcccccttcccttttttttcggtcagaccttttattttctactcttttcagaggggttttctgtttgtttgggttttgtttcttgctgtgactgaaacaagaaggttattgcagcaaaaatcagtaacaaaaaatagtaacaataccttgcagaggaaaggtgggagagaggaaaaaaggaaattctatagaaatctatatattgggttgtttttttttttgttttttgttttttttttttgggtttttttttttactatatatcttttttttgttgtctctagcctgatcagataggagcacaagcaggggacggaaagagagagacactcaggcggcagcattccctcccagccactgagctgtcgtgccagcaccattcctggtcacgcaaaacagaacccagttagcagcagggagacgagaacaccacacaagacatttttctacagtatttcaggtgcctaccacacaggaaaccttgaagaaaatcagtttctagaagccgctgttacctcttgtttacagtttatatatatatgatagatatgagatatatatataaaaggtactgttaactactgtacaacccgacttcataatggtgctttcaaacagcgagatgagtaaaaacatcagcttccacgttgccttctgcgcaaagggtttcaccaaggatggagaaagggagacagcttgcagatggcgcgttctcacggtgggctcttccccttggtttgtaacgaagtgaaggaggagaacttgggagccaggttctccctgccaaaaagggggctagatgaggtggtcgggcccgtggacagctgagagtgggattcatccagactcatgcaataaccctttgattgttttctaaaaggagactccctcggcaagatggcagagggtacggagtcttcaggcccagtttctcactttagccaattcgagggctccttgtggtgggatcagaactaatccagagtgtgggaaagtgacagtcaaaaccccacctggagcaaataaaaaaacatacaaaacgta

SEQ ID NO: 246 - DNA, 4294 bp, Homo sapiens
  source 1..4294: mol_type = genomic DNA
gacgcggcgccgcggcaccagggcgcgcagccgggccggcccgaccccaccggccatacggtggagccatcgaagcccccacccacaggctgacagaggcaccgttcaccagagggctcaacaccgggatctatgtttaagttttaactctcgcctccaaagaccacgataattccttccccaaagcccagcagccccccagccccgcgcagccccagcctgcctcccggcgcccagatgcccgccatgccctccagcggccccggggacaccagcagctctgctgcggagcgggaggaggaccgaaaggacggagaggagcaggaggagccgcgtggcaaggaggagcgccaagagcccagcaccacggcacggaaggtggggcggcctgggaggaagcgcaagcaccccccggtggaaagcggtgacacgccaaaggaccctgcggtgatctccaagtccccatccatggcccaggactcaggcgcctcagagctattacccaatggggacttggagaagcggagtgagccccagccagaggaggggagccctgctggggggcagaagggcggggccccagcagagggagagggtgcagctgagaccctgcctgaagcctcaagagcagtggaaaatggctgctgcacccccaaggagggccgaggagcccctgcagaagcgggcaaagaacagaaggagaccaacatcgaatccatgaaaatggagggctcccggggccggctgcggggtggcttgggctgggagtccagcctccgtcagcggcccatgccgaggctcaccttccaggcgggggacccctactacatcagcaagcgcaagcgggacgagtggctggcacgctggaaaagggaggctgagaagaaagccaaggtcattgcaggaatgaatgctgtggaagaaaaccaggggcccggggagtctcagaaggtggaggaggccagccctcctgctgtgcagcagcccactgaccccgcatcccccactgtggctaccacgcctgagcccgtggggtccgatgctggggacaagaatgccaccaaagcaggcgatgacgagccagagtacgaggacggccggggctttggcattggggagctggtgtgggggaaactgcggggcttctcctggtggccaggccgcattgtgtcttggtggatgacgggccggagccgagcagctgaaggcacccgctgggtcatgtggttcggagacggcaaattctcagtggtgtgtgttgagaagctgatgccgctgagctcgttttgcagtgcgttccaccaggccacgtacaacaagcagcccatgtaccgcaaagccatctacgaggtcctgcaggtggccagcagccgcgcggggaagctgttcccggtgtgccacgacagcgatgagagtgacactgccaaggccgtggaggtgcagaacaagcccatgattgaatgggccctggggggcttccagccttctggccctaagggcctggagccaccagaagaagagaagaatccctacaaagaagtgtacacggacatgtgggtggaacctgaggcagctgcctacgcaccacctccaccagccaaaaagccccggaagagcacagcggagaagcccaaggtcaaggagattattgatgagcgcacaagagagcggctggtgtacgaggtgcggcagaagtgccggaacattgaggacatctgcatctcctgtgggagcctcaatgttaccctggaacaccccctcttcgttggaggaatgtgccaaaactgcaagaactgctttctggagtgtgcgtaccagtacgacgacgacggctaccagtcctactgcaccatctgctgtgggggccgtgaggtgctcatgtgcggaaacaacaactgctgcaggtgcttttgcgtggagtgtgtggacctcttggtggggccgggggctgcccaggcagccattaaggaagacccctggaactgctacatgtgcgggcacaagggtacctacgggctgctgcggcggcgagaggactggccctcccggctccagatgttcttcgctaataaccacgaccaggaatttgaccctccaaaggtttacccacctgtcccagctgagaagaggaagcccatccgggtgctgtctctctttgatggaatcgctacagggctcctggtgctgaaggacttgggcattcaggtggaccgctacattgcctcggaggtgtgtgaggactccatcacggtgggcatggtgcggcaccaggggaagatcatgtacgtcggggacgtccgcagcgtcacacagaagcatatccaggagtggggcccattcgatctggtgattgggggcagtccctgcaatgacctctccatcgtcaaccctgctcgcaagggcctctacgagggcactggccggctcttctttgagttctaccgcctcctgcatgatgcgcggcccaaggagggagatgatcgccccttcttctggctctttgagaatgtggtggccatgggcgttagtgacaagagggacatctcgcgatttctcgagtccaaccctgtgatgattgatgccaaagaagtgtcagctgcacacagggcccgctacttctggggtaaccttcccggtatgaacaggccgttggcatccactgtgaatgataagctggagctgcaggagtgtctggagcatggcaggatagccaagttcagcaaagtgaggaccattactacgaggtcaaactccataaagcagggcaaagaccagcattttcctgtcttcatgaatgagaaagaggacatcttatggtgcactgaaatggaaagggtatttggtttcccagtccactatactgacgtctccaacatgagccgcttggcgaggcagagactgctgggccggtcatggagcgtgccagtcatccgccacctcttcgctccgctgaaggagtattttgcgtgtgtgtaagggacatgggggcaaactgaggtagcgacacaaagttaaacaaacaaacaaaaaacacaaaacataataaaacaccaagaacatgaggatggagagaagtatcagcacccagaagagaaaaaggaatttaaaacaaaaaccacagaggcggaaataccggagggctttgccttgcgaaaagggttggacatcatctcctgatttttcaatgttattcttcagtcctatttaaaaacaaaaccaagctcccttcccttcctcccccttcccttttttttcggtcagaccttttattttctactcttttcagaggggttttctgtttgtttgggttttgtttcttgctgtgactgaaacaagaaggttattgcagcaaaaatcagtaacaaaaaatagtaacaataccttgcagaggaaaggtgggagagaggaaaaaaaggaaattctatagaaatctatatattgggttgtttttttttttgttttttgtttttttttttgggtttttttttttactatatatcttttttttgttgtctctagcctgatcagataggagcacaagcaggggacggaaagagagagacactcaggcggcagcattccctcccagccactgagctgtcgtgccagcaccattcctggtcacgcaaaacagaacccagttagcagcagggagacgagaacaccacacaagacatttttctacagtatttcaggtgcctaccacacaggaaaccttgaagaaaatcagtttctagaagccgctgttacctcttgtttacagtttatatatatatgatagatatgagatatatatataaaaggtactgttaactactgtacaacccgacttcataatggtgctttcaaacagcgagatgagtaaaaacatcagcttccacgttgccttctgcgcaaagggtttcaccaaggatggagaaagggagacagcttgcagatggcgcgttctcacggtgggctcttccccttggtttgtaacgaagtgaaggaggagaacttgggagccaggttctccctgccaaaaagggggctagatgaggtggtcgggcccgtggacagctgagagtgggattcatccagactcatgcaataaccctttgattgttttctaaaaggagactccctcggcaagatggcagagggtacggagtcttcaggcccagtttctcactttagccaattcgagggctccttgtggtgggatcagaactaatccagagtgtgggaaagtgacagtcaaaaccccacctggagcaaataaaaaaacatacaaaacgtaaaaaaaaaaaaaaaa

SEQ ID NO: 247 - DNA, 4258 bp, Homo sapiens
  source 1..4258: mol_type = genomic DNA
cagtgctggatgcggggacccagcgcagaagcagcgccaggtggagccatcgaagcccccacccacaggctgacagaggcaccgttcaccagagggctcaacaccgggatctatgtttaagttttaactctcgcctccaaagaccacgataattccttccccaaagcccagcagccccccagccccgcgcagccccagcctgcctcccggcgcccagatgcccgccatgccctccagcggccccggggacaccagcagctctgctgcggagcgggaggaggaccgaaaggacggagaggagcaggaggagccgcgtggcaaggaggagcgccaagagcccagcaccacggcacggaaggtggggcggcctgggaggaagcgcaagcaccccccggtggaaagcggtgacacgccaaaggaccctgcggtgatctccaagtccccatccatggcccaggactcaggcgcctcagagctattacccaatggggacttggagaagcggagtgagccccagccagaggaggggagccctgctggggggcagaagggcggggccccagcagagggagagggtgcagctgagaccctgcctgaagcctcaagagcagtggaaaatggctgctgcacccccaaggagggccgaggagcccctgcagaagcgggcaaagaacagaaggagaccaacatcgaatccatgaaaatggagggctcccggggccggctgcggggtggcttgggctgggagtccagcctccgtcagcggcccatgccgaggctcaccttccaggcgggggacccctactacatcagcaagcgcaagcgggacgagtggctggcacgctggaaaagggaggctgagaagaaagccaaggtcattgcaggaatgaatgctgtggaagaaaaccaggggcccggggagtctcagaaggtggaggaggccagccctcctgctgtgcagcagcccactgaccccgcatcccccactgtggctaccacgcctgagcccgtggggtccgatgctggggacaagaatgccaccaaagcaggcgatgacgagccagagtacgaggacggccggggctttggcattggggagctggtgtgggggaaactgcggggcttctcctggtggccaggccgcattgtgtcttggtggatgacgggccggagccgagcagctgaaggcacccgctgggtcatgtggttcggagacggcaaattctcagtggtgtgtgttgagaagctgatgccgctgagctcgttttgcagtgcgttccaccaggccacgtacaacaagcagcccatgtaccgcaaagccatctacgaggtcctgcaggtggccagcagccgcgcggggaagctgttcccggtgtgccacgacagcgatgagagtgacactgccaaggccgtggaggtgcagaacaagcccatgattgaatgggccctggggggcttccagccttctggccctaagggcctggagccaccagaagaagagaagaatccctacaaagaagtgtacacggacatgtgggtggaacctgaggcagctgcctacgcaccacctccaccagccaaaaagccccggaagagcacagcggagaagcccaaggtcaaggagattattgatgagcgcacaagagagcggctggtgtacgaggtgcggcagaagtgccggaacattgaggacatctgcatctcctgtgggagcctcaatgttaccctggaacaccccctcttcgttggaggaatgtgccaaaactgcaagaactgctttctggagtgtgcgtaccagtacgacgacgacggctaccagtcctactgcaccatctgctgtgggggccgtgaggtgctcatgtgcggaaacaacaactgctgcaggtgcttttgcgtggagtgtgtggacctcttggtggggccgggggctgcccaggcagccattaaggaagacccctggaactgctacatgtgcgggcacaagggtacctacgggctgctgcggcggcgagaggactggccctcccggctccagatgttcttcgctaataaccacgaccaggaatttgaccctccaaaggtttacccacctgtcccagctgagaagaggaagcccatccgggtgctgtctctctttgatggaatcgctacagggctcctggtgctgaaggacttgggcattcaggtggaccgctacattgcctcggaggtgtgtgaggactccatcacggtgggcatggtgcggcaccaggggaagatcatgtacgtcggggacgtccgcagcgtcacacagaagcatatccaggagtggggcccattcgatctggtgattgggggcagtccctgcaatgacctctccatcgtcaaccctgctcgcaagggcctctacgagggcactggccggctcttctttgagttctaccgcctcctgcatgatgcgcggcccaaggagggagatgatcgccccttcttctggctctttgagaatgtggtggccatgggcgttagtgacaagagggacatctcgcgatttctcgagtccaaccctgtgatgattgatgccaaagaagtgtcagctgcacacagggcccgctacttctggggtaaccttcccggtatgaacaggccgttggcatccactgtgaatgataagctggagctgcaggagtgtctggagcatggcaggatagccaagttcagcaaagtgaggaccattactacgaggtcaaactccataaagcagggcaaagaccagcattttcctgtcttcatgaatgagaaagaggacatcttatggtgcactgaaatggaaagggtatttggtttcccagtccactatactgacgtctccaacatgagccgcttggcgaggcagagactgctgggccggtcatggagcgtgccagtcatccgccacctcttcgctccgctgaaggagtattttgcgtgtgtgtaagggacatgggggcaaactgaggtagcgacacaaagttaaacaaacaaacaaaaaacacaaaacataataaaacaccaagaacatgaggatggagagaagtatcagcacccagaagagaaaaaggaatttaaaacaaaaaccacagaggcggaaataccggagggctttgccttgcgaaaagggttggacatcatctcctgatttttcaatgttattcttcagtcctatttaaaaacaaaaccaagctcccttcccttcctcccccttcccttttttttcggtcagaccttttattttctactcttttcagaggggttttctgtttgtttgggttttgtttcttgctgtgactgaaacaagaaggttattgcagcaaaaatcagtaacaaaaaatagtaacaataccttgcagaggaaaggtgggagagaggaaaaaaggaaattctatagaaatctatatattgggttgtttttttttttgttttttgttttttttttttgggtttttttttttactatatatcttttttttgttgtctctagcctgatcagataggagcacaagcaggggacggaaagagagagacactcaggcggcagcattccctcccagccactgagctgtcgtgccagcaccattcctggtcacgcaaaacagaacccagttagcagcagggagacgagaacaccacacaagacatttttctacagtatttcaggtgcctaccacacaggaaaccttgaagaaaatcagtttctagaagccgctgttacctcttgtttacagtttatatatatatgatagatatgagatatatatataaaaggtactgttaactactgtacaacccgacttcataatggtgctttcaaacagcgagatgagtaaaaacatcagcttccacgttgccttctgcgcaaagggtttcaccaaggatggagaaagggagacagcttgcagatggcgcgttctcacggtgggctcttccccttggtttgtaacgaagtgaaggaggagaacttgggagccaggttctccctgccaaaaagggggctagatgaggtggtcgggcccgtggacagctgagagtgggattcatccagactcatgcaataaccctttgattgttttctaaaaggagactccctcggcaagatggcagagggtacggagtcttcaggcccagtttctcactttagccaattcgagggctccttgtggtgggatcagaactaatccagagtgtgggaaagtgacagtcaaaaccccacctggagcaaataaaaaaacatacaaaacgt

SEQ ID NO: 248 - DNA, 4476 bp, Homo sapiens
  source 1..4476: mol_type = genomic DNA
ggggccgctgtccctgcggccagtgctggatgcggggacccagcgcagaagcagcgccaggtggagccatcgaagcccccacccacaggctgacagaggcaccgttcaccagagggctcaacaccgggatctatgtttaagttttaactctcgcctccaaagaccacgataattccttccccaaagcccagcagccccccagccccgcgcagccccagcctgcctcccggcgcccagatgcccgccatgccctccagcggccccggggacaccagcagctctgctgcggagcgggaggaggaccgaaaggacggagaggagcaggaggagccgcgtggcaaggaggagcgccaagagcccagcaccacggcacggaaggtggggcggcctgggaggaagcgcaagcaccccccggtggaaagcggtgacacgccaaaggaccctgcggtgatctccaagtccccatccatggcccaggactcaggcgcctcagagctattacccaatggggacttggagaagcggagtgagccccagccagaggaggggagccctgctggggggcagaagggcggggccccagcagagggagagggtgcagctgagaccctgcctgaagcctcaagagcagtggaaaatggctgctgcacccccaaggagggccgaggagcccctgcagaagcgggcaaagaacagaaggagaccaacatcgaatccatgaaaatggagggctcccggggccggctgcggggtggcttgggctgggagtccagcctccgtcagcggcccatgccgaggctcaccttccaggcgggggacccctactacatcagcaagcgcaagcgggacgagtggctggcacgctggaaaagggaggctgagaagaaagccaaggtcattgcaggaatgaatgctgtggaagaaaaccaggggcccggggagtctcagaaggtggaggaggccagccctcctgctgtgcagcagcccactgaccccgcatcccccactgtggctaccacgcctgagcccgtggggtccgatgctggggacaagaatgccaccaaagcaggcgatgacgagccagagtacgaggacggccggggctttggcattggggagctggtgtgggggaaactgcggggcttctcctggtggccaggccgcattgtgtcttggtggatgacgggccggagccgagcagctgaaggcacccgctgggtcatgtggttcggagacggcaaattctcagtggtgtgtgttgagaagctgatgccgctgagctcgttttgcagtgcgttccaccaggccacgtacaacaagcagcccatgtaccgcaaagccatctacgaggtcctgcaggtggccagcagccgcgcggggaagctgttcccggtgtgccacgacagcgatgagagtgacactgccaaggccgtggaggtgcagaacaagcccatgattgaatgggccctggggggcttccagccttctggccctaagggcctggagccaccagaagaagagaagaatccctacaaagaagtgtacacggacatgtgggtggaacctgaggcagctgcctacgcaccacctccaccagccaaaaagccccggaagagcacagcggagaagcccaaggtcaaggagattattgatgagcgcacaagagagcggctggtgtacgaggtgcggcagaagtgccggaacattgaggacatctgcatctcctgtgggagcctcaatgttaccctggaacaccccctcttcgttggaggaatgtgccaaaactgcaagaactgctttctggagtgtgcgtaccagtacgacgacgacggctaccagtcctactgcaccatctgctgtgggggccgtgaggtgctcatgtgcggaaacaacaactgctgcaggtgcttttgcgtggagtgtgtggacctcttggtggggccgggggctgcccaggcagccattaaggaagacccctggaactgctacatgtgcgggcacaagggtacctacgggctgctgcggcggcgagaggactggccctcccggctccagatgttcttcgctaataaccacgaccaggaatttgaccctccaaaggtttacccacctgtcccagctgagaagaggaagcccatccgggtgctgtctctctttgatggaatcgctacagggctcctggtgctgaaggacttgggcattcaggtggaccgctacattgcctcggaggtgtgtgaggactccatcacggtgggcatggtgcggcaccaggggaagatcatgtacgtcggggacgtccgcagcgtcacacagaagcatatccaggagtggggcccattcgatctggtgattgggggcagtccctgcaatgacctctccatcgtcaaccctgctcgcaagggcctctacgagggcactggccggctcttctttgagttctaccgcctcctgcatgatgcgcggcccaaggagggagatgatcgccccttcttctggctctttgagaatgtggtggccatgggcgttagtgacaagagggacatctcgcgatttctcgaggtacaaaatagccacctgtactagtgggctagtggccactgaattgaacagtgtagaggacaacccaccatcgcagaagttcatttggacaatgctgatctagaacgttccagtgacagcttgtggaatgtggctaggtgtaattccagcttctcctggaggctgcaggctagcccagtgtgtggctcctgagagagaatccaaccctgtgatgattgatgccaaagaagtgtcagctgcacacagggcccgctacttctggggtaaccttcccggtatgaacaggccgttggcatccactgtgaatgataagctggagctgcaggagtgtctggagcatggcaggatagccaagttcagcaaagtgaggaccattactacgaggtcaaactccataaagcagggcaaagaccagcattttcctgtcttcatgaatgagaaagaggacatcttatggtgcactgaaatggaaagggtatttggtttcccagtccactatactgacgtctccaacatgagccgcttggcgaggcagagactgctgggccggtcatggagcgtgccagtcatccgccacctcttcgctccgctgaaggagtattttgcgtgtgtgtaagggacatgggggcaaactgaggtagcgacacaaagttaaacaaacaaacaaaaaacacaaaacataataaaacaccaagaacatgaggatggagagaagtatcagcacccagaagagaaaaaggaatttaaaacaaaaaccacagaggcggaaataccggagggctttgccttgcgaaaagggttggacatcatctcctgatttttcaatgttattcttcagtcctatttaaaaacaaaaccaagctcccttcccttcctcccccttcccttttttttcggtcagaccttttattttctactcttttcagaggggttttctgtttgtttgggttttgtttcttgctgtgactgaaacaagaaggttattgcagcaaaaatcagtaacaaaaaatagtaacaataccttgcagaggaaaggtgggagagaggaaaaaaggaaattctatagaaatctatatattgggttgtttttttttttgttttttgtttttttttttgggtttttttttttactatatatcttttttttgttgtctctagcctgatcagataggagcacaagcaggggacggaaagagagagacactcaggcggcagcattccctcccagccactgagctgtcgtgccagcaccattcctggtcacgcaaaacagaacccagttagcagcagggagacgagaacaccacacaagacatttttctacagtatttcaggtgcctaccacacaggaaaccttgaagaaaatcagtttctagaagccgctgttacctcttgtttacagtttatatatatatgatagatatgagatatatatataaaaggtactgttaactactgtacaacccgacttcataatggtgctttcaaacagcgagatgagtaaaaacatcagcttccacgttgccttctgcgcaaagggtttcaccaaggatggagaaagggagacagcttgcagatggcgcgttctcacggtgggctcttccccttggtttgtaacgaagtgaaggaggagaacttgggagccaggttctccctgccaaaaagggggctagatgaggtggtcgggcccgtggacagctgagagtgggattcatccagactcatgcaataaccctttgattgttttctaaaaggagactccctcggcaagatggcagagggtacggagtcttcaggcccagtttctcactttagccaattcgagggctccttgtggtgggatcagaactaatccagagtgtgggaaagtgacagtcaaaaccccacctggagcaaataaaaaaacatacaaaacgt

SEQ ID NO: 249 - DNA, 1758 bp, Homo sapiens
  source 1..1758: mol_type = genomic DNA
agctgagaagaggaagcccatccgggtgctgtctctctttgatggaatcgctacagggctcctggtgctgaaggacttgggcattcaggtggaccgctacattgcctcggaggtgtgtgaggactccatcacggtgggcatggtgcggcaccaggggaagatcatgtacgtcggggacgtccgcagcgtcacacagaagcatatccaggagtggggcccattcgatctggtgattgggggcagtccctgcaatgacctctccatcgtcaaccctgctcgcaagggcctctacgagggcactggccggctcttctttgagttctaccgcctcctgcatgatgcgcggcccaaggagggagatgatcgccccttcttctggctctttgagaatgtggtggccatgggcgttagtgacaagagggacatctcgcgatttctcgagtccaaccctgtgatgattgatgccaaagaagtgtcagctgcacacagggcccgctacttctggggtaaccttcccggtatgaacaggccgttggcatccactgtgaatgataagctggagctgcaggagtgtctggagcatggcaggatagccaagttcagcaaagtgaggaccattactacgaggtcaaactccataaagcagggcaaagaccagcattttcctgtcttcatgaatgagaaagaggacatcttatggtgcactgaaatggaaagggtatttggtttcccagtccactatactgacgtctccaacatgagccgcttggcgaggcagagactgctgggccggtcatggagcgtgccagtcatccgccacctcttcgctccgctgaaggagtattttgcgtgtgtgtaagggacatgggggcaaactgaggtagcgacacaaagttaaacaaacaaacaaaaaacacaaaacataataaaacaccaagaacatgaggatggagagaagtatcagcacccagaagagaaaaaggaatttaaaacaaaaaccacagaggcggaaataccggagggctttgccttgcgaaaagggttggacatcatctcctgatttttcaatgttattcttcagtcctatttaaaaacaaaaccaagctcccttcccttcctcccccttcccttttttttcggtcagaccttttattttctactcttttcagaggggttttctgtttgtttgggttttgtttcttgctgtgactgaaacaagaaggttattgcagcaaaaatcagtaacaaaaaatagtaacaataccttgcagaggaaaggtgggagagaggaaaaaaggaaattctatagaaatctatatattgggttgtttttttttttgttttttgttttttttttttgggtttttttttttactatatatcttttttttgttgtctctagcctgatcagataggagcacaagcaggggacggaaagagagagacactcaggcggcagcattccctcccagccactgagctgtcgtgccagcaccattcctggtcacgcaaaacagaacccagttagcagcagggagacgagaacaccacacaagacatttttctacagtatttcaggtgcctaccacacaggaaaccttgaagaaaatcagtttctagaagccgctgttacctcttgtttacagtttatatatatatgatagatatgagatatatatataaaaggtactgttaactactgtaaaaaaaaaaaaaaaaaaaaaaaaaaaaaaaaaaaaaaaaaaaaaaaaaaaaaaa

SEQ ID NO: 250 - DNA, 2371 bp, Homo sapiens
  source 1..2371: mol_type = genomic DNA
ccgcccccagccccatcgcccccttcccctcccccaagacgggcagctacttccagagcttcagggccgcggctcacacctgagcgcgactgcagaggggctgcacctggccttatggggatcctggagcgggttgtgagaaggaatgggcgcgtggatcgtagcctgaaagacgagtgtgatacggctgagaagaaagccaaggtcattgcaggaatgaatgctgtggaagaaaaccaggggcccggggagtctcagaaggtggaggaggccagccctcctgctgtgcagcagcccactgaccccgcatcccccactgtggctaccacgcctgagcccgtggggtccgatgctggggacaagaatgccaccaaagcaggcgatgacgagccagagtacgaggacggccggggctttggcattggggagctggtgtgggggaaactgcggggcttctcctggtggccaggccgcattgtgtcttggtggatgacgggccggagccgagcagctgaaggcacccgctgggtcatgtggttcggagacggcaaattctcagtggtgtgtgttgagaagctgatgccgctgagctcgttttgcagtgcgttccaccaggccacgtacaacaagcagcccatgtaccgcaaagccatctacgaggtcctgcaggtggccagcagccgcgcggggaagctgttcccggtgtgccacgacagcgatgagagtgacactgccaaggccgtggaggtgcagaacaagcccatgattgaatgggccctggggggcttccagccttctggccctaagggcctggagccaccagaagaagagaagaatccctacaaagaagtgtacacggacatgtgggtggaacctgaggcagctgcctacgcaccacctccaccagccaaaaagccccggaagagcacagcggagaagcccaaggtcaaggagattattgatgagcgcacaagagagcggctggtgtacgaggtgcggcagaagtgccggaacattgaggacatctgcatctcctgtgggagcctcaatgttaccctggaacaccccctcttcgttggaggaatgtgccaaaactgcaagaactgctttctggagtgtgcgtaccagtacgacgacgacggctaccagtcctactgcaccatctgctgtgggggccgtgaggtgctcatgtgcggaaacaacaactgctgcaggtgcttttgcgtggagtgtgtggacctcttggtggggccgggggctgcccaggcagccattaaggaagacccctggaactgctacatgtgcgggcacaagggtacctacgggctgctgcggcggcgagaggactggccctcccggctccagatgttcttcgctaataaccacgaccaggaatttgaccctccaaaggtttacccacctgtcccagctgagaagaggaagcccatccgggtgctgtctctctttgatggaatcgctacagggctcctggtgctgaaggacttgggcattcaggtggaccgctacattgcctcggaggtgtgtgaggactccatcacggtgggcatggtgcggcaccaggggaagatcatgtacgtcggggacgtccgcagcgtcacacagaagcatatccaggagtggggcccattcgatctggtgattgggggcagtccctgcaatgacctctccatcgtcaaccctgctcgcaagggcctctacgagggcactggccggctcttctttgagttctaccgcctcctgcatgatgcgcggcccaaggagggagatgatcgccccttcttctggctctttgagaatgtggtggccatgggcgttagtgacaagagggacatctcgcgatttctcgagtccaaccctgtgatgattgatgccaaagaagtgtcagctgcacacagggcccgctacttctggggtaaccttcccggtatgaacaggccgttggcatccactgtgaatgataagctggagctgcaggagtgtctggagcatggcaggatagccaagttcagcaaagtgaggaccattactacgaggtcaaactccataaagcagggcaaagaccagcattttcctgtcttcatgaatgagaaagaggacatcttatggtgcactgaaatggaaagggtatttggtttcccagtccactatactgacgtctccaacatgagccgcttggcgaggcagagactgctgggccggtcatggagcgtgccagtcatccgccacctcttcgctccgctgaaggagtattttgcgtgtgtgtaagggacatgggggcaaactgaggtagcgacacaaagttaaacaaacaaacaaaaaacacaaaacataataaaacaccaagaacatg

SEQ ID NO: 251 - DNA, 1113 bp, Homo sapiens
  source 1..1113: mol_type = genomic DNA
agtgtgtggacctcttggtggggccgggggctgcccaggcagccattaaggaagacccctggaactgctacatgtgcgggcacaagggtacctacgggctgctgcggcggcgagaggactggccctcccggctccagatgttcttcgctaataaccacgaccaggaatttgaccctccaaaggtttacccacctgtcccagctgagaagaggaagcccatccgggtgctgtctctctttgatggaatcgctacagggctcctggtgctgaaggacttgggcattcaggtggaccgctacattgcctcggaggtgtgtgaggactccatcacggtgggcatggtgcggcaccaggggaagatcatgtacgtcggggacgtccgcagcgtcacacagaagcatatccaggagtggggcccattcgatctggtgattgggggcagtccctgcaatgacctctccatcgtcaaccctgctcgcaagggcctctacgagggcactggccggctcttctttgagttctaccgcctcctgcatgatgcgcggcccaaggagggagatgatcgccccttcttctggctctttgagaatgtggtggccatgggcgttagtgacaagagggacatctcgcgatttctcgagtccaaccctgtgatgattgatgccaaagaagtgtcagctgcacacagggcccgctacttctggggtaaccttcccggtatgaacaggccgttggcatccactgtgaatgataagctggagctgcaggagtgtctggagcatggcaggatagccaagttcagcaaagtgaggaccattactacgaggtcaaactccataaagcagggcaaagaccagcattttcctgtcttcatgaatgagaaagaggacatcttatggtgcactgaaatggaaagggtatttggtttcccagtccactatactgacgtctccaacatgagccgcttggcgaggcagagactgctgggccggtcatggagcgtgccagtcatccgccacctcttcgctccgctgaaggagtattttgcgtgtgtgtaagggacatgggggcaaactgaggtagcgacacaaagttaaaaaaaaaaaacaaaaa

SEQ ID NO: 252 - DNA, 3005 bp, Homo sapiens
  source 1..3005: mol_type = genomic DNA
gccgcggcaccagggcgcgcagccgggccggcccgaccccaccggccatacggtggagccatcgaagcccccacccacaggctgacagaggcaccgttcaccagagggctcaacaccgggatctatgtttaagttttaactctcgcctccaaagaccacgataattccttccccaaagcccagcagccccccagccccgcgcagccccagcctgcctcccggcgcccagatgcccgccatgccctccagcggccccggggacaccagcagctctgctgcggagcgggaggaggaccgaaaggacggagaggagcaggaggagccgcgtggcaaggaggagcgccaagagcccagcaccacggcacggaaggtggggcggcctgggaggaagcgcaagcaccccccggtggaaagcggtgacacgccaaaggaccctgcggtgatctccaagtccccatccatggcccaggactcaggcgcctcagagctattacccaatggggacttggagaagcggagtgagccccagccagaggaggggagccctgctggggggcagaagggcggggccccagcagagggagagggtgcagctgagaccctgcctgaagcctcaagagcagtggaaaatggctgctgcacccccaaggagggccgaggagcccctgcagaagcgggcaaagaacagaaggagaccaacatcgaatccatgaaaatggagggctcccggggccggctgcggggtggcttgggctgggagtccagcctccgtcagcggcccatgccgaggctcaccttccaggcgggggacccctactacatcagcaagcgcaagcgggacgagtggctggcacgctggaaaagggaggctgagaagaaagccaaggtcattgcaggaatgaatgctgtggaagaaaaccaggggcccggggagtctcagaaggtggaggaggccagccctcctgctgtgcagcagcccactgaccccgcatcccccactgtggctaccacgcctgagcccgtggggtccgatgctggggacaagaatgccaccaaagcaggcgatgacgagccagagtacgaggacggccggggctttggcattggggagctggtgtgggggaaactgcggggcttctcctggtggccaggccgcattgtgtcttggtggatgacgggccggagccgagcagctgaaggcacccgctgggtcatgtggttcggagacggcaaattctcagtggtgtgtgttgagaagctgatgccgctgagctcgttttgcagtgcgttccaccaggccacgtacaacaagcagcccatgtaccgcaaagccatctacgaggtcctgcaggtggccagcagccgcgcggggaagctgttcccggtgtgccacgacagcgatgagagtgacactgccaaggccgtggaggtgcagaacaagcccatgattgaatgggccctggggggcttccagccttctggccctaagggcctggagccaccagaagaagagaagaatccctacaaagaagtgtacacggacatgtgggtggaacctgaggcagctgcctacgcaccacctccaccagccaaaaagccccggaagagcacagcggagaagcccaaggtcaaggagattattgatgagcgcacaagagagcggctggtgtacgaggtgcggcagaagtgccggaacattgaggacatctgcatctcctgtgggagcctcaatgttaccctggaacaccccctcttcgttggaggaatgtgccaaaactgcaagaactgctttctggagtgtgcgtaccagtacgacgacgacggctaccagtcctactgcaccatctgctgtgggggccgtgaggtgctcatgtgcggaaacaacaactgctgcaggtgcttttgcgtggagtgtgtggacctcttggtggggccgggggctgcccaggcagccattaaggaagacccctggaactgctacatgtgcgggcacaagggtacctacgggctgctgcggcggcgagaggactggccctcccggctccagatgttcttcgctaataaccacgaccaggaatttgaccctccaaaggtttacccacctgtcccagctgagaagaggaagcccatccgggtgctgtctctctttgatggaatcgctacagggctcctggtgctgaaggacttgggcattcaggtggaccgctacattgcctcggaggtgtgtgaggactccatcacggtgggcatggtgcggcaccaggggaagatcatgtacgtcggggacgtccgcagcgtcacacagaagcatatccaggagtggggcccattcgatctggtgattgggggcagtccctgcaatgacctctccatcgtcaaccctgctcgcaagggcctctacgagggcactggccggctcttctttgagttctaccgcctcctgcatgatgcgcggcccaaggagggagatgatcgccccttcttctggctctttgagaatgtggtggccatgggcgttagtgacaagagggacatctcgcgatttctcgagtccaaccctgtgatgattgatgccaaagaagtgtcagctgcacacagggcccgctacttctggggtaaccttcccggtatgaacaggccgttggcatccactgtgaatgataagctggagctgcaggagtgtctggagcatggcaggatagccaagttcagcaaagtgaggaccattactacgaggtcaaactccataaagcagggcaaagaccagcattttcctgtcttcatgaatgagaaagaggacatcttatggtgcactgaaatggaaagggtatttggtttcccagtccactatactgacgtctccaacatgagccgcttggcgaggcagagactgctgggccggtcatggagcgtgccagtcatccgccacctcttcgctccgctgaaggagtattttgcgtgtgtgtaagggacatgggggcaaactgaggtagcgacacaaagtt

SEQ ID NO: 253 - DNA, 943 bp, Homo sapiens
  source 1..943: mol_type = genomic DNA
gcggggacccagcgcagaagcagcgccaggtggagccatcgaagcccccacccacaggctgacagaggcaccgttcaccagagggctcaacaccgggatctatgtttaagttttaactctcgcctccaaagaccacgataattccttccccaaagcccagcagccccccagccccgcgcagccccagcctgcctcccggcgcccagatgcccgccatgccctccagcggccccggggacaccagcagctctgctgcggagcgggaggaggaccgaaaggacggagaggagcaggaggagccgcgtggcaaggaggagcgccaagagcccagcaccacggcacggaaggtggggcggcctgggaggaagcgcaagcaccccccggtggaaagcggtgacacgccaaaggaccctgcggtgatctccaagtccccatccatggcccaggactcaggcgcctcagagctattacccaatggggacttggagaagcggagtgagccccagccagaggaggggagccctgctggggggcagaagggcggggccccagcagagggagagggtgcagctgagaccctgcctgaagcctcaagagcagtggaaaatggctgctgcacccccaaggagggccgaggagcccctgcagaagcgggtgagtcctcagcaccaggggcagcctcttctgggcccaccagcataccctgagagtcagggacttggctctccagcaggtcccaggaaggatggtctgggtcgtggctaaaggtctgcttgccaaggctatggcctggaggctactggctggatgcagcctgcgcatatgttttatttggcccatagagtgttttaaacatttaaaaaattagttgccagtatttaaaaatcaaaaaatttcacataaaaatctggagttttggcttctcatgaaaaaaaaaaaaaaa

SEQ ID NO: 254 - DNA, 4279 bp, Homo sapiens
  source 1..4279: mol_type = genomic DNA
gacgcggcgccgcggcaccagggcgcgcagccgggccggcccgaccccaccggccatacggtggagccatcgaagcccccacccacaggctgacagaggcaccgttcaccagagggctcaacaccgggatctatgtttaagttttaactctcgcctccaaagaccacgataattccttccccaaagcccagcagccccccagccccgcgcagccccagcctgcctcccggcgcccagatgcccgccatgccctccagcggccccggggacaccagcagctctgctgcggagcgggaggaggaccgaaaggacggagaggagcaggaggagccgcgtggcaaggaggagcgccaagagcccagcaccacggcacggaaggtggggcggcctgggaggaagcgcaagcaccccccggtggaaagcggtgacacgccaaaggaccctgcggtgatctccaagtccccatccatggcccaggactcaggcgcctcagagctattacccaatggggacttggagaagcggagtgagccccagccagaggaggggagccctgctggggggcagaagggcggggccccagcagagggagagggtgcagctgagaccctgcctgaagcctcaagagcagtggaaaatggctgctgcacccccaaggagggccgaggagcccctgcagaagcgggcaaagaacagaaggagaccaacatcgaatccatgaaaatggagggctcccggggccggctgcggggtggcttgggctgggagtccagcctccgtcagcggcccatgccgaggctcaccttccaggcgggggacccctactacatcagcaagcgcaagcgggacgagtggctggcacgctggaaaagggaggctgagaagaaagccaaggtcattgcaggaatgaatgctgtggaagaaaaccaggggcccggggagtctcagaaggtggaggaggccagccctcctgctgtgcagcagcccactgaccccgcatcccccactgtggctaccacgcctgagcccgtggggtccgatgctggggacaagaatgccaccaaagcaggcgatgacgagccagagtacgaggacggccggggctttggcattggggagctggtgtgggggaaactgcggggcttctcctggtggccaggccgcattgtgtcttggtggatgacgggccggagccgagcagctgaaggcacccgctgggtcatgtggttcggagacggcaaattctcagtggtgtgtgttgagaagctgatgccgctgagctcgttttgcagtgcgttccaccaggccacgtacaacaagcagcccatgtaccgcaaagccatctacgaggtcctgcaggtggccagcagccgcgcggggaagctgttcccggtgtgccacgacagcgatgagagtgacactgccaaggccgtggaggtgcagaacaagcccatgattgaatgggccctggggggcttccagccttctggccctaagggcctggagccaccagaagaagagaagaatccctacaaagaagtgtacacggacatgtgggtggaacctgaggcagctgcctacgcaccacctccaccagccaaaaagccccggaagagcacagcggagaagcccaaggtcaaggagattattgatgagcgcacaagagagcggctggtgtacgaggtgcggcagaagtgccggaacattgaggacatctgcatctcctgtgggagcctcaatgttaccctggaacaccccctcttcgttggaggaatgtgccaaaactgcaagaactgctttctggagtgtgcgtaccagtacgacgacgacggctaccagtcctactgcaccatctgctgtgggggccgtgaggtgctcatgtgcggaaacaacaactgctgcaggtgcttttgcgtggagtgtgtggacctcttggtggggccgggggctgcccaggcagccattaaggaagacccctggaactgctacatgtgcgggcacaagggtacctacgggctgctgcggcggcgagaggactggccctcccggctccagatgttcttcgctaataaccacgaccaggaatttgaccctccaaaggtttacccacctgtcccagctgagaagaggaagcccatccgggtgctgtctctctttgatggaatcgctacagggctcctggtgctgaaggacttgggcattcaggtggaccgctacattgcctcggaggtgtgtgaggactccatcacggtgggcatggtgcggcaccaggggaagatcatgtacgtcggggacgtccgcagcgtcacacagaagcatatccaggagtggggcccattcgatctggtgattgggggcagtccctgcaatgacctctccatcgtcaaccctgctcgcaagggcctctacgagggcactggccggctcttctttgagttctaccgcctcctgcatgatgcgcggcccaaggagggagatgatcgccccttcttctggctctttgagaatgtggtggccatgggcgttagtgacaagagggacatctcgcgatttctcgagtccaaccctgtgatgattgatgccaaagaagtgtcagctgcacacagggcccgctacttctggggtaaccttcccggtatgaacaggccgttggcatccactgtgaatgataagctggagctgcaggagtgtctggagcatggcaggatagccaagttcagcaaagtgaggaccattactacgaggtcaaactccataaagcagggcaaagaccagcattttcctgtcttcatgaatgagaaagaggacatcttatggtgcactgaaatggaaagggtatttggtttcccagtccactatactgacgtctccaacatgagccgcttggcgaggcagagactgctgggccggtcatggagcgtgccagtcatccgccacctcttcgctccgctgaaggagtattttgcgtgtgtgtaagggacatgggggcaaactgaggtagcgacacaaagttaaacaaacaaacaaaaaacacaaaacataataaaacaccaagaacatgaggatggagagaagtatcagcacccagaagagaaaaaggaatttaaaacaaaaaccacagaggcggaaataccggagggctttgccttgcgaaaagggttggacatcatctcctgatttttcaatgttattcttcagtcctatttaaaaacaaaaccaagctcccttcccttcctcccccttcccttttttttcggtcagaccttttattttctactcttttcagaggggttttctgtttgtttgggttttgtttcttgctgtgactgaaacaagaaggttattgcagcaaaaatcagtaacaaaaaatagtaacaataccttgcagaggaaaggtgggagagaggaaaaaaggaaattctatagaaatctatatattgggttgtttttttttttgttttttgttttttttttttgggtttttttttttactatatatcttttttttgttgtctctagcctgatcagataggagcacaagcaggggacggaaagagagagacactcaggcggcagcattccctcccagccactgagctgtcgtgccagcaccattcctggtcacgcaaaacagaacccagttagcagcagggagacgagaacaccacacaagacatttttctacagtatttcaggtgcctaccacacaggaaaccttgaagaaaatcagtttctagaagccgctgttacctcttgtttacagtttatatatatatgatagatatgagatatatatataaaaggtactgttaactactgtacaacccgacttcataatggtgctttcaaacagcgagatgagtaaaaacatcagcttccacgttgccttctgcgcaaagggtttcaccaaggatggagaaagggagacagcttgcagatggcgcgttctcacggtgggctcttccccttggtttgtaacgaagtgaaggaggagaacttgggagccaggttctccctgccaaaaagggggctagatgaggtggtcgggcccgtggacagctgagagtgggattcatccagactcatgcaataaccctttgattgttttctaaaaggagactccctcggcaagatggcagagggtacggagtcttcaggcccagtttctcactttagccaattcgagggctccttgtggtgggatcagaactaatccagagtgtgggaaagtgacagtcaaaaccccacctggagcaaataaaaaaacatacaaaacgta

SEQ ID NO: 255 - DNA, 4477 bp, Homo sapiens
  source 1..4477: mol_type = genomic DNA
ggggccgctgtccctgcggccagtgctggatgcggggacccagcgcagaagcagcgccaggtggagccatcgaagcccccacccacaggctgacagaggcaccgttcaccagagggctcaacaccgggatctatgtttaagttttaactctcgcctccaaagaccacgataattccttccccaaagcccagcagccccccagccccgcgcagccccagcctgcctcccggcgcccagatgcccgccatgccctccagcggccccggggacaccagcagctctgctgcggagcgggaggaggaccgaaaggacggagaggagcaggaggagccgcgtggcaaggaggagcgccaagagcccagcaccacggcacggaaggtggggcggcctgggaggaagcgcaagcaccccccggtggaaagcggtgacacgccaaaggaccctgcggtgatctccaagtccccatccatggcccaggactcaggcgcctcagagctattacccaatggggacttggagaagcggagtgagccccagccagaggaggggagccctgctggggggcagaagggcggggccccagcagagggagagggtgcagctgagaccctgcctgaagcctcaagagcagtggaaaatggctgctgcacccccaaggagggccgaggagcccctgcagaagcgggcaaagaacagaaggagaccaacatcgaatccatgaaaatggagggctcccggggccggctgcggggtggcttgggctgggagtccagcctccgtcagcggcccatgccgaggctcaccttccaggcgggggacccctactacatcagcaagcgcaagcgggacgagtggctggcacgctggaaaagggaggctgagaagaaagccaaggtcattgcaggaatgaatgctgtggaagaaaaccaggggcccggggagtctcagaaggtggaggaggccagccctcctgctgtgcagcagcccactgaccccgcatcccccactgtggctaccacgcctgagcccgtggggtccgatgctggggacaagaatgccaccaaagcaggcgatgacgagccagagtacgaggacggccggggctttggcattggggagctggtgtgggggaaactgcggggcttctcctggtggccaggccgcattgtgtcttggtggatgacgggccggagccgagcagctgaaggcacccgctgggtcatgtggttcggagacggcaaattctcagtggtgtgtgttgagaagctgatgccgctgagctcgttttgcagtgcgttccaccaggccacgtacaacaagcagcccatgtaccgcaaagccatctacgaggtcctgcaggtggccagcagccgcgcggggaagctgttcccggtgtgccacgacagcgatgagagtgacactgccaaggccgtggaggtgcagaacaagcccatgattgaatgggccctggggggcttccagccttctggccctaagggcctggagccaccagaagaagagaagaatccctacaaagaagtgtacacggacatgtgggtggaacctgaggcagctgcctacgcaccacctccaccagccaaaaagccccggaagagcacagcggagaagcccaaggtcaaggagattattgatgagcgcacaagagagcggctggtgtacgaggtgcggcagaagtgccggaacattgaggacatctgcatctcctgtgggagcctcaatgttaccctggaacaccccctcttcgttggaggaatgtgccaaaactgcaagaactgctttctggagtgtgcgtaccagtacgacgacgacggctaccagtcctactgcaccatctgctgtgggggccgtgaggtgctcatgtgcggaaacaacaactgctgcaggtgcttttgcgtggagtgtgtggacctcttggtggggccgggggctgcccaggcagccattaaggaagacccctggaactgctacatgtgcgggcacaagggtacctacgggctgctgcggcggcgagaggactggccctcccggctccagatgttcttcgctaataaccacgaccaggaatttgaccctccaaaggtttacccacctgtcccagctgagaagaggaagcccatccgggtgctgtctctctttgatggaatcgctacagggctcctggtgctgaaggacttgggcattcaggtggaccgctacattgcctcggaggtgtgtgaggactccatcacggtgggcatggtgcggcaccaggggaagatcatgtacgtcggggacgtccgcagcgtcacacagaagcatatccaggagtggggcccattcgatctggtgattgggggcagtccctgcaatgacctctccatcgtcaaccctgctcgcaagggcctctacgagggcactggccggctcttctttgagttctaccgcctcctgcatgatgcgcggcccaaggagggagatgatcgccccttcttctggctctttgagaatgtggtggccatgggcgttagtgacaagagggacatctcgcgatttctcgaggtacaaaatagccacctgtactagtgggctagtggccactgaattgaacagtgtagaggacaacccaccatcgcagaagttcatttggacaatgctgatctagaacgttccagtgacagcttgtggaatgtggctaggtgtaattccagcttctcctggaggctgcaggctagcccagtgtgtggctcctgagagagaatccaaccctgtgatgattgatgccaaagaagtgtcagctgcacacagggcccgctacttctggggtaaccttcccggtatgaacaggccgttggcatccactgtgaatgataagctggagctgcaggagtgtctggagcatggcaggatagccaagttcagcaaagtgaggaccattactacgaggtcaaactccataaagcagggcaaagaccagcattttcctgtcttcatgaatgagaaagaggacatcttatggtgcactgaaatggaaagggtatttggtttcccagtccactatactgacgtctccaacatgagccgcttggcgaggcagagactgctgggccggtcatggagcgtgccagtcatccgccacctcttcgctccgctgaaggagtattttgcgtgtgtgtaagggacatgggggcaaactgaggtagcgacacaaagttaaacaaacaaacaaaaaacacaaaacataataaaacaccaagaacatgaggatggagagaagtatcagcacccagaagagaaaaaggaatttaaaacaaaaaccacagaggcggaaataccggagggctttgccttgcgaaaagggttggacatcatctcctgatttttcaatgttattcttcagtcctatttaaaaacaaaaccaagctcccttcccttcctcccccttcccttttttttcggtcagaccttttattttctactcttttcagaggggttttctgtttgtttgggttttgtttcttgctgtgactgaaacaagaaggttattgcagcaaaaatcagtaacaaaaaatagtaacaataccttgcagaggaaaggtgggagagaggaaaaaaggaaattctatagaaatctatatattgggttgtttttttttttgttttttgttttttttttttgggtttttttttttactatatatcttttttttgttgtctctagcctgatcagataggagcacaagcaggggacggaaagagagagacactcaggcggcagcattccctcccagccactgagctgtcgtgccagcaccattcctggtcacgcaaaacagaacccagttagcagcagggagacgagaacaccacacaagacatttttctacagtatttcaggtgcctaccacacaggaaaccttgaagaaaatcagtttctagaagccgctgttacctcttgtttacagtttatatatatatgatagatatgagatatatatataaaaggtactgttaactactgtacaacccgacttcataatggtgctttcaaacagcgagatgagtaaaaacatcagcttccacgttgccttctgcgcaaagggtttcaccaaggatggagaaagggagacagcttgcagatggcgcgttctcacggtgggctcttccccttggtttgtaacgaagtgaaggaggagaacttgggagccaggttctccctgccaaaaagggggctagatgaggtggtcgggcccgtggacagctgagagtgggattcatccagactcatgcaataaccctttgattgttttctaaaaggagactccctcggcaagatggcagagggtacggagtcttcaggcccagtttctcactttagccaattcgagggctccttgtggtgggatcagaactaatccagagtgtgggaaagtgacagtcaaaaccccacctggagcaaataaaaaaacatacaaaacgt

SEQ ID NO: 256 - DNA, 3585 bp, Homo sapiens
  source 1..3585: mol_type = genomic DNA
ggatctccgcagccctccgggtttgaaaagagtgaagtatgcctccccggcccgcagcagccgcggcgtcccggcctggcccgagttctggagatgctgacttagtgctggcccgccgccttcctgcccacgagccccaaggccccactcctcgagggctccagtggcacctggcgccctcgggggacaggaagagcagccggccgggagcccgggcagtggctgagaagaaagccaaggtcattgcaggaatgaatgctgtggaagaaaaccaggggcccggggagtctcagaaggtggaggaggccagccctcctgctgtgcagcagcccactgaccccgcatcccccactgtggctaccacgcctgagcccgtggggtccgatgctggggacaagaatgccaccaaagcaggcgatgacgagccagagtacgaggacggccggggctttggcattggggagctggtgtgggggaaactgcggggcttctcctggtggccaggccgcattgtgtcttggtggatgacgggccggagccgagcagctgaaggcacccgctgggtcatgtggttcggagacggcaaattctcagtggtgtgtgttgagaagctgatgccgctgagctcgttttgcagtgcgttccaccaggccacgtacaacaagcagcccatgtaccgcaaagccatctacgaggtcctgcaggtggccagcagccgcgcggggaagctgttcccggtgtgccacgacagcgatgagagtgacactgccaaggccgtggaggtgcagaacaagcccatgattgaatgggccctggggggcttccagccttctggccctaagggcctggagccaccagaagaagagaagaatccctacaaagaagtgtacacggacatgtgggtggaacctgaggcagctgcctacgcaccacctccaccagccaaaaagccccggaagagcacagcggagaagcccaaggtcaaggagattattgatgagcgcacaagagagcggctggtgtacgaggtgcggcagaagtgccggaacattgaggacatctgcatctcctgtgggagcctcaatgttaccctggaacaccccctcttcgttggaggaatgtgccaaaactgcaagaactgctttctggagtgtgcgtaccagtacgacgacgacggctaccagtcctactgcaccatctgctgtgggggccgtgaggtgctcatgtgcggaaacaacaactgctgcaggtgcttttgcgtggagtgtgtggacctcttggtggggccgggggctgcccaggcagccattaaggaagacccctggaactgctacatgtgcgggcacaagggtacctacgggctgctgcggcggcgagaggactggccctcccggctccagatgttcttcgctaataaccacgaccaggaatttgaccctccaaaggtttacccacctgtcccagctgagaagaggaagcccatccgggtgctgtctctctttgatggaatcgctacagggctcctggtgctgaaggacttgggcattcaggtggaccgctacattgcctcggaggtgtgtgaggactccatcacggtgggcatggtgcggcaccaggggaagatcatgtacgtcggggacgtccgcagcgtcacacagaagcatatccaggagtggggcccattcgatctggtgattgggggcagtccctgcaatgacctctccatcgtcaaccctgctcgcaagggcctctacgagggcactggccggctcttctttgagttctaccgcctcctgcatgatgcgcggcccaaggagggagatgatcgccccttcttctggctctttgagaatgtggtggccatgggcgttagtgacaagagggacatctcgcgatttctcgagtccaaccctgtgatgattgatgccaaagaagtgtcagctgcacacagggcccgctacttctggggtaaccttcccggtatgaacaggccgttggcatccactgtgaatgataagctggagctgcaggagtgtctggagcatggcaggatagccaagttcagcaaagtgaggaccattactacgaggtcaaactccataaagcagggcaaagaccagcattttcctgtcttcatgaatgagaaagaggacatcttatggtgcactgaaatggaaagggtatttggtttcccagtccactatactgacgtctccaacatgagccgcttggcgaggcagagactgctgggccggtcatggagcgtgccagtcatccgccacctcttcgctccgctgaaggagtattttgcgtgtgtgtaagggacatgggggcaaactgaggtagcgacacaaagttaaacaaacaaacaaaaaacacaaaacataataaaacaccaagaacatgaggatggagagaagtatcagcacccagaagagaaaaaggaatttaaaacaaaaaccacagaggcggaaataccggagggctttgccttgcgaaaagggttggacatcatctcctgatttttcaatgttattcttcagtcctatttaaaaacaaaaccaagctcccttcccttcctcccccttcccttttttttcggtcagaccttttattttctactcttttcagaggggttttctgtttgtttgggttttgtttcttgctgtgactgaaacaagaaggttattgcagcaaaaatcagtaacaaaaaatagtaacaataccttgcagaggaaaggtgggagagaggaaaaaaggaaattctatagaaatctatatattgggttgtttttttttttgttttttgttttttttttttgggtttttttttttactatatatcttttttttgttgtctctagcctgatcagataggagcacaagcaggggacggaaagagagagacactcaggcggcagcattccctcccagccactgagctgtcgtgccagcaccattcctggtcacgcaaaacagaacccagttagcagcagggagacgagaacaccacacaagacatttttctacagtatttcaggtgcctaccacacaggaaaccttgaagaaaatcagtttctagaagccgctgttacctcttgtttacagtttatatatatatgatagatatgagatatatatataaaaggtactgttaactactgtacaacccgacttcataatggtgctttcaaacagcgagatgagtaaaaacatcagcttccacgttgccttctgcgcaaagggtttcaccaaggatggagaaagggagacagcttgcagatggcgcgttctcacggtgggctcttccccttggtttgtaacgaagtgaaggaggagaacttgggagccaggttctccctgccaaaaagggggctagatgaggtggtcgggcccgtggacagctgagagtgggattcatccagactcatgcaataaccctttgattgttttctaaaaggagactccctcggcaagatggcagagggtacggagtcttcaggcccagtttctcactttagccaattcgagggctccttgtggtgggatcagaactaatccagagtgtgggaaagtgacagtcaa

SEQ ID NO: 257 - protein, 912 aa, Homo sapiens
MPAMPSSGPGDTSSSAAEREEDRKDGEEQEEPRGKEERQEPSTTARKVGRPGRKRKHPPVESGDTPKDPAVISKSPSMAQDSGASELLPNGDLEKRSEPQPEEGSPAGGQKGGAPAEGEGAAETLPEASRAVENGCCTPKEGRGAPAEAGKEQKETNIESMKMEGSRGRLRGGLGWESSLRQRPMPRLTFQAGDPYYISKRKRDEWLARWKREAEKKAKVIAGMNAVEENQGPGESQKVEEASPPAVQQPTDPASPTVATTPEPVGSDAGDKNATKAGDDEPEYEDGRGFGIGELVWGKLRGFSWWPGRIVSWWMTGRSRAAEGTRWVMWFGDGKFSVVCVEKLMPLSSFCSAFHQATYNKQPMYRKAIYEVLQVASSRAGKLFPVCHDSDESDTAKAVEVQNKPMIEWALGGFQPSGPKGLEPPEEEKNPYKEVYTDMWVEPEAAAYAPPPPAKKPRKSTAEKPKVKEIIDERTRERLVYEVRQKCRNIEDICISCGSLNVTLEHPLFVGGMCQNCKNCFLECAYQYDDDGYQSYCTICCGGREVLMCGNNNCCRCFCVECVDLLVGPGAAQAAIKEDPWNCYMCGHKGTYGLLRRREDWPSRLQMFFANNHDQEFDPPKVYPPVPAEKRKPIRVLSLFDGIATGLLVLKDLGIQVDRYIASEVCEDSITVGMVRHQGKIMYVGDVRSVTQKHIQEWGPFDLVIGGSPCNDLSIVNPARKGLYEGTGRLFFEFYRLLHDARPKEGDDRPFFWLFENVVAMGVSDKRDISRFLESNPVMIDAKEVSAAHRARYFWGNLPGMNRPLASTVNDKLELQECLEHGRIAKFSKVRTITTRSNSIKQGKDQHFPVFMNEKEDILWCTEMERVFGFPVHYTDVSNMSRLARQRLLGRSWSVPVIRHLFAPLKEYFACV

SEQ ID NO: 258 - protein, 166 aa, Homo sapiens
MPAMPSSGPGDTSSSAAEREEDRKDGEEQEEPRGKEERQEPSTTARKVGRPGRKRKHPPVESGDTPKDPAVISKSPSMAQDSGASELLPNGDLEKRSEPQPEEGSPAGGQKGGAPAEGEGAAETLPEASRAVENGCCTPKEGRGAPAEAGESSAPGAASSGPTSIP

SEQ ID NO: 259 - protein, 723 aa, Homo sapiens
MGILERVVRRNGRVDRSLKDECDTAEKKAKVIAGMNAVEENQGPGESQKVEEASPPAVQQPTDPASPTVATTPEPVGSDAGDKNATKAGDDEPEYEDGRGFGIGELVWGKLRGFSWWPGRIVSWWMTGRSRAAEGTRWVMWFGDGKFSVVCVEKLMPLSSFCSAFHQATYNKQPMYRKAIYEVLQVASSRAGKLFPVCHDSDESDTAKAVEVQNKPMIEWALGGFQPSGPKGLEPPEEEKNPYKEVYTDMWVEPEAAAYAPPPPAKKPRKSTAEKPKVKEIIDERTRERLVYEVRQKCRNIEDICISCGSLNVTLEHPLFVGGMCQNCKNCFLECAYQYDDDGYQSYCTICCGGREVLMCGNNNCCRCFCVECVDLLVGPGAAQAAIKEDPWNCYMCGHKGTYGLLRRREDWPSRLQMFFANNHDQEFDPPKVYPPVPAEKRKPIRVLSLFDGIATGLLVLKDLGIQVDRYIASEVCEDSITVGMVRHQGKIMYVGDVRSVTQKHIQEWGPFDLVIGGSPCNDLSIVNPARKGLYEGTGRLFFEFYRLLHDARPKEGDDRPFFWLFENVVAMGVSDKRDISRFLESNPVMIDAKEVSAAHRARYFWGNLPGMNRPLASTVNDKLELQECLEHGRIAKFSKVRTITTRSNSIKQGKDQHFPVFMNEKEDILWCTEMERVFGFPVHYTDVSNMSRLARQRLLGRSWSVPVIRHLFAPLKEYFACV

SEQ ID NO: 260 - protein, 689 aa, Homo sapiens
MNAVEENQGPGESQKVEEASPPAVQQPTDPASPTVATTPEPVGSDAGDKNATKAGDDEPEYEDGRGFGIGELVWGKLRGFSWWPGRIVSWWMTGRSRAAEGTRWVMWFGDGKFSVVCVEKLMPLSSFCSAFHQATYNKQPMYRKAIYEVLQVASSRAGKLFPVCHDSDESDTAKAVEVQNKPMIEWALGGFQPSGPKGLEPPEEEKNPYKEVYTDMWVEPEAAAYAPPPPAKKPRKSTAEKPKVKEIIDERTRERLVYEVRQKCRNIEDICISCGSLNVTLEHPLFVGGMCQNCKNCFLECAYQYDDDGYQSYCTICCGGREVLMCGNNNCCRCFCVECVDLLVGPGAAQAAIKEDPWNCYMCGHKGTYGLLRRREDWPSRLQMFFANNHDQEFDPPKVYPPVPAEKRKPIRVLSLFDGIATGLLVLKDLGIQVDRYIASEVCEDSITVGMVRHQGKIMYVGDVRSVTQKHIQEWGPFDLVIGGSPCNDLSIVNPARKGLYEGTGRLFFEFYRLLHDARPKEGDDRPFFWLFENVVAMGVSDKRDISRFLESNPVMIDAKEVSAAHRARYFWGNLPGMNRPLASTVNDKLELQECLEHGRIAKFSKVRTITTRSNSIKQGKDQHFPVFMNEKEDILWCTEMERVFGFPVHYTDVSNMSRLARQRLLGRSWSVPVIRHLFAPLKEYFACV

SEQ ID NO: 261 - protein, 760 aa, Homo sapiens
MPPRPAAAAASRPGPSSGDADLVLARRLPAHEPQGPTPRGLQWHLAPSGDRKSSRPGARAVAEKKAKVIAGMNAVEENQGPGESQKVEEASPPAVQQPTDPASPTVATTPEPVGSDAGDKNATKAGDDEPEYEDGRGFGIGELVWGKLRGFSWWPGRIVSWWMTGRSRAAEGTRWVMWFGDGKFSVVCVEKLMPLSSFCSAFHQATYNKQPMYRKAIYEVLQVASSRAGKLFPVCHDSDESDTAKAVEVQNKPMIEWALGGFQPSGPKGLEPPEEEKNPYKEVYTDMWVEPEAAAYAPPPPAKKPRKSTAEKPKVKEIIDERTRERLVYEVRQKCRNIEDICISCGSLNVTLEHPLFVGGMCQNCKNCFLECAYQYDDDGYQSYCTICCGGREVLMCGNNNCCRCFCVECVDLLVGPGAAQAAIKEDPWNCYMCGHKGTYGLLRRREDWPSRLQMFFANNHDQEFDPPKVYPPVPAEKRKPIRVLSLFDGIATGLLVLKDLGIQVDRYIASEVCEDSITVGMVRHQGKIMYVGDVRSVTQKHIQEWGPFDLVIGGSPCNDLSIVNPARKGLYEGTGRLFFEFYRLLHDARPKEGDDRPFFWLFENVVAMGVSDKRDISRFLESNPVMIDAKEVSAAHRARYFWGNLPGMNRPLASTVNDKLELQECLEHGRIAKFSKVRTITTRSNSIKQGKDQHFPVFMNEKEDILWCTEMERVFGFPVHYTDVSNMSRLARQRLLGRSWSVPVIRHLFAPLKEYFACV

SEQ ID NO: 262 - protein, 909 aa, Homo sapiens
MPSSGPGDTSSSAAEREEDRKDGEEQEEPRGKEERQEPSTTARKVGRPGRKRKHPPVESGDTPKDPAVISKSPSMAQDSGASELLPNGDLEKRSEPQPEEGSPAGGQKGGAPAEGEGAAETLPEASRAVENGCCTPKEGRGAPAEAGKEQKETNIESMKMEGSRGRLRGGLGWESSLRQRPMPRLTFQAGDPYYISKRKRDEWLARWKREAEKKAKVIAGMNAVEENQGPGESQKVEEASPPAVQQPTDPASPTVATTPEPVGSDAGDKNATKAGDDEPEYEDGRGFGIGELVWGKLRGFSWWPGRIVSWWMTGRSRAAEGTRWVMWFGDGKFSVVCVEKLMPLSSFCSAFHQATYNKQPMYRKAIYEVLQVASSRAGKLFPVCHDSDESDTAKAVEVQNKPMIEWALGGFQPSGPKGLEPPEEEKNPYKEVYTDMWVEPEAAAYAPPPPAKKPRKSTAEKPKVKEIIDERTRERLVYEVRQKCRNIEDICISCGSLNVTLEHPLFVGGMCQNCKNCFLECAYQYDDDGYQSYCTICCGGREVLMCGNNNCCRCFCVECVDLLVGPGAAQAAIKEDPWNCYMCGHKGTYGLLRRREDWPSRLQMFFANNHDQEFDPPKVYPPVPAEKRKPIRVLSLFDGIATGLLVLKDLGIQVDRYIASEVCEDSITVGMVRHQGKIMYVGDVRSVTQKHIQEWGPFDLVIGGSPCNDLSIVNPARKGLYEGTGRLFFEFYRLLHDARPKEGDDRPFFWLFENVVAMGVSDKRDISRFLESNPVMIDAKEVSAAHRARYFWGNLPGMNRPLASTVNDKLELQECLEHGRIAKFSKVRTITTRSNSIKQGKDQHFPVFMNEKEDILWCTEMERVFGFPVHYTDVSNMSRLARQRLLGRSWSVPVIRHLFAPLKEYFACV

SEQ ID NO: 263 - protein, 811 aa, Homo sapiens
LSPPKTTIIPSPKPSSPPAPRSPSLPPGAQMPAMPSSGPGDTSSSAAEREEDRKDGEEQEEPRGKEERQEPSTTARKVGRPGRKRKHPPVESGDTPKDPAVISKSPSMAQDSGASELLPNGDLEKRSEPQPEEGSPAGGQKGGAPAEGEGAAETLPEASRAVENGCCTPKEGRGAPAEAGKEQKETNIESMKMEGSRGRLRGGLGWESSLRQRPMPRLTFQAGDPYYISKRKRDEWLARWKREAEKKAKVIAGMNAVEENQGPGESQKVEEASPPAVQQPTDPASPTVATTPEPVGSDAGDKNATKAGDDEPEYEDGRGFGIGELVWGKLRGFSWWPGRIVSWWMTGRSRAAEGTRWVMWFGDGKFSVVCVEKLMPLSSFCSAFHQATYNKQPMYRKAIYEVLQVASSRAGKLFPVCHDSDESDTAKAVEVQNKPMIEWALGGFQPSGPKGLEPPEEEKNPYKEVYTDMWVEPEAAAYAPPPPAKKPRKSTAEKPKVKEIIDERTRERLVYEVRQKCRNIEDICISCGSLNVTLEHPLFVGGMCQNCKNCFLECAYQYDDDGYQSYCTICCGGREVLMCGNNNCCRCFCVECVDLLVGPGAAQAAIKEDPWNCYMCGHKGTYGLLRRREDWPSRLQMFFANNHDQEFDPPKVYPPVPAEKRKPIRVLSLFDGIATGLLVLKDLGIQVDRYIASEVCEDSITVGMVRHQGKIMYVGDVRSVTQKHIQEWGPFDLVIGGSPCNDLSIVNPARKGLYEGTGRLFFEFYRLLHDARPKEGDDRPFFWLFENVVAMGVSDKRDISRFLEVQNSHLY

SEQ ID NO: 264 - protein, 285 aa, Homo sapiens
AEKRKPIRVLSLFDGIATGLLVLKDLGIQVDRYIASEVCEDSITVGMVRHQGKIMYVGDVRSVTQKHIQEWGPFDLVIGGSPCNDLSIVNPARKGLYEGTGRLFFEFYRLLHDARPKEGDDRPFFWLFENVVAMGVSDKRDISRFLESNPVMIDAKEVSAAHRARYFWGNLPGMNRPLASTVNDKLELQECLEHGRIAKFSKVRTITTRSNSIKQGKDQHFPVFMNEKEDILWCTEMERVFGFPVHYTDVSNMSRLARQRLLGRSWSVPVIRHLFAPLKEYFACV

SEQ ID NO: 265 - protein, 351 aa, Homo sapiens
CVDLLVGPGAAQAAIKEDPWNCYMCGHKGTYGLLRRREDWPSRLQMFFANNHDQEFDPPKVYPPVPAEKRKPIRVLSLFDGIATGLLVLKDLGIQVDRYIASEVCEDSITVGMVRHQGKIMYVGDVRSVTQKHIQEWGPFDLVIGGSPCNDLSIVNPARKGLYEGTGRLFFEFYRLLHDARPKEGDDRPFFWLFENVVAMGVSDKRDISRFLESNPVMIDAKEVSAAHRARYFWGNLPGMNRPLASTVNDKLELQECLEHGRIAKFSKVRTITTRSNSIKQGKDQHFPVFMNEKEDILWCTEMERVFGFPVHYTDVSNMSRLARQRLLGRSWSVPVIRHLFAPLKEYFACV

SEQ ID NO: 266 - protein, 781 aa, Homo sapiens
MPAMPSSGPGDTSSSAAEREEDRKDGEEQEEPRGKEERQEPSTTARKVGRPGRKRKHPPVESGDTPKDPAVISKSPSMAQDSGASELLPNGDLEKRSEPQPEEGSPAGGQKGGAPAEGEGAAETLPEASRAVENGCCTPKEGRGAPAEAGKEQKETNIESMKMEGSRGRLRGGLGWESSLRQRPMPRLTFQAGDPYYISKRKRDEWLARWKREAEKKAKVIAGMNAVEENQGPGESQKVEEASPPAVQQPTDPASPTVATTPEPVGSDAGDKNATKAGDDEPEYEDGRGFGIGELVWGKLRGFSWWPGRIVSWWMTGRSRAAEGTRWVMWFGDGKFSVVCVEKLMPLSSFCSAFHQATYNKQPMYRKAIYEVLQVASSRAGKLFPVCHDSDESDTAKAVEVQNKPMIEWALGGFQPSGPKGLEPPEEEKNPYKEVYTDMWVEPEAAAYAPPPPAKKPRKSTAEKPKVKEIIDERTRERLVYEVRQKCRNIEDICISCGSLNVTLEHPLFVGGMCQNCKNCFLECAYQYDDDGYQSYCTICCGGREVLMCGNNNCCRCFCVECVDLLVGPGAAQAAIKEDPWNCYMCGHKGTYGLLRRREDWPSRLQMFFANNHDQEFDPPKVYPPVPAEKRKPIRVLSLFDGIATGLLVLKDLGIQVDRYIASEVCEDSITVGMVRHQGKIMYVGDVRSVTQKHIQEWGPFDLVIGGSPCNDLSIVNPARKGLYEGTGRLFFEFYRLLHDARPKEGDDRPFFWLFENVVAMGVSDKRDISRFLEVQNSHLY

SEQ ID NO: 267 - DNA, 80931 bp, Homo sapiens
  source 1..80931: mol_type = genomic DNA
cacacacactcacacacacccacggcagacacgcacgcacccgggcgccgaagggaaagccgcgtctcgccctcccgccccgccgtcggtcctgtctcagtccctcagcagagcgggaaagcggaggccggagccgtgacctctgaccccgtggttatgcggagccgccgcattccttagcgatcgcggggcagccgccgctgccgccgtgggcgactgacgcagcgcgggcgcgtggagccgccgccgcccctcccccaccgccgctctcgcgccagccggtccccgcgtgcccgccccttctccccggccgcacccgagacctcgcgcgccgccgctgccacgcgccccccccaccgccgccgccgccccagccccgcgccaccgccccagcccgcccagcccggaggtcccgcgtggagctgccgccgccgccggggagaaggatgaaggacaaacagaagaagaagaaggagcgcacgtgggccgaggccgcgcgcctggtgaggcggacagccgaggggggctccgtggggcccggggtggggggggctcgccgcgcacccccccactggggggggaggggcaaggccctgcccaccgcgggagggggcggggccatcttcctttaagaacgggacagccccgcaaggcgaggggtggggagcgctccgccgggatgggatgtggcgcctttttccgctcgccctcgcgccccccccgccccgcgcagctaaattccggcggaggggcgagctggcaggccggctcctcccactctgggcagcggggtcccgcgtcccctcccccactatttggcagcgtctgggggtctggggcagcttcgttcattcacccgggggagttgggtttccgggaagggtcggaagctcctccctcgcttcctggtgggtaatggggtggtgcctttgactccgggggtggaaaagcgaccccacattcaaggacgccaatggcatgttgagctttcccaatctaaaccaggtgcgtggagggaagcaagtgcttactcccagcttgaaccctgagcagcggttctctaactttagtgtcctgtgggcgacacctgggaggcggttaggaacgctactcctagggcccttcgtaagacctgctgagcctcagggtctgggatagagcctgggaatctgcgctttcaccagcttcccaggtgattcaaacgcagtggctcacggaccccactttgagaaacgcagactgggctgtttgccttcagaagctggactggaaattggtattttgaggagaactgaatccactttgcaaagaatgtatgttggacaaagacaaagtatctctgttgggagacgttgttcactgaggatttagcaagggagagcgtaacttgagtgtttgaagccgtctcgttcaaccgatgggggttgtgaattttgtgttcagagcgtcagaggacttgcaggtgaaatagcttccttttggattactcccacaaagctcagacactttgagacatattcgggtaattatctgctgataccagtagtaacaggttatactaagatgtcagttcctaagatctgtcacacagcgaggttgtggtgcggatagcataagtgtctcttgacactgtagtttatatgtaatggttgtaattcagttttaatgatgagtgaagctcagacttaattttctctcttattttgaagtgagttttctgcttcaaaggtgttgtgcaaaaaaaaaaaaaatagactgtattgggggggttgacacaaacctgaagtacacctttttctttctcgaagtctgtaaaagttacagatttataaaaactgaaggaatttgggctacagaattttcattggtgcttgctatcctcttccctagtcatttgttgcccagggaacaaaaatagcaattgtttgtatgctgaagttttgtgcttcagtttattttggcctggcatgtgaagtttgaagattttgaggttccgaaatattttttttctgattgagtcaaaattggaagcttgggctagttttcaggatcttgtagaaatttcaggatttctctaacggttctgcacctggaaacaaatataggcctgatggggagtgggagagagctctcgttctcctcctcgacaatgagttttgtgtgttcattgacattctccttggcgttcctgttatgcgggtgtttatgaccctgggcacccaaggaaatttgcttgccagagttttacttgttagaggtaggtgaaagtacttttaagtcttgtgttatttatgtcttgacagaattatgaaatctgtttgtctcaaagttctgttggctcttactagttgactttaggaatttggggtccactgttaagtctctttagattctcgaatttaccgtggtctgaacttcaacatcgaggttgctatttctgttttatcattgactcaacttcaagccaggttatcagggtaagttattcctctttttcttctaaggctcttcattaaaaatagtaatatgaataggaattactttgtttgtttgtttttcgtttgtttgccaccacacccggctaattttttatttttagtaaagatggggtttttccatgctggtcaggctggtctcgaactcgtgaccttaggttatccgcccaccttggcctcccaaagtgctgggattacaggcgtgagccaccgcgcccagcctatgagtaggaattactttgtggtgctgttatacatgtgaaaaaggatttgcgagactttgggagtctgaggtggaataatcacttgaggctaggaattcgagatgagcctgggcaacatagacccggtctctacaacaacagcaacaaaatgagctgggcatggtggtacacacctgtggtcctagctactcaggaggctgaggatagcttaggccgaggagttggaggctgcagtgcccaatgattgattgtaccactgcactccagcctgggtgatagagggagaccctgactctaaaaaaataatgaggctgggcgctgtggctcacgcctgtaatcccagcactttgggacgccgaggtgggtggatcacagggtcaggagttctagaccagcttggccaacaaggtaaaacccagtctctactaaaaatacaaaaattagccgggtgtggtggtgcacgcctgtaatcccagctactgagggggctgagacaggagaatcacttgaacttgggaggtggaggttgcagagagccaaggccatgccactgtccagcctgggtgacagagcaagactcgtctcaaaaaaaaaaaaaaaagaaaaaaagaaaaaggacttgttgagaatgtgatatgcaatttgagtatcttgtgtgtgttttttgttttagaattttccatttctttgaatgggactggatggtaggtgagggggaactttttaagagtcccaggccgggcacggtggctcacgcctgtaatcccagctctttgggaggccgaggcagacggatcacctgaggccagaagttcgagaccagcctggccaacatggtgaaaccccgtctctactaaaaatacaaaaattagccaggcatggtgatggtgcatgcctgtaacctcagctactcgggaggctgaggcaggagaatcacttgaactcgggaggtggaggttgcagtgaacccagatcacaccactgcactccagcggcgacagtgagactctgtctcaaaaacaaaacaaaagaaaaaaccagtcctcttaatgtttaaaaaaagttgctgtaacactgtactggagaatttgtgagagcgtacactggactgagagaaacttgactaggagggaacgtaggacagttgattagaacacctgaacacttctctttgggcaggtgaatttggagtgcttgcaatggcaattgtatgcacttccatgggaacgctttcagattgctcctgaccccactcagattggtgactagagtgttactgggaatccttttaaaaattgtttttgtaggctgtgcgcggtggctcacgcctgtaatcccagcactttgggaggccgaggcgggcggatcacgaggtcaggagatcgagaccatcctggctaacacggtgaaaccccatctctactaaaaatacaaaaaattagccaggcgtggtggcgagtgcctgtagtcccagctactcgggaggctgaggccggagaatggcgtgaacgcgggaggcggagcttgcagtgagccgagatcgagctactgcactccatccagcctgggcgacagagcaagactctgtctcaaaaacaaacaaacaaaacaacaacaacaaaaaaacctttcgtagaggaaagaagattcttaagaatttcagtatagtgtaccccaggagattgatttttgcagatgttaattatgctgttgaaaaatagtctttctttcacacattttgtagtattgtcttttctaggtgtaagaagtagaccttatgtggttgagtggatataaatcctccaacttgttataaacagtttgtttgggagaaatagccaaggggatttccctttaaatcgaggacgctaaatggattctccctggcttcgagaaactctttgttgtatgctttatcttttactttgattcatgactgaccagttcttacatcaaacatttttttcccctttgaagtaagagaagagatacttaaaaaaaaaaatgtagtctagaaagagactaggaatagaacactgctgacttgttcttataccaagagctggaggcataaacagttttaataaaaaagaatactttgtatcttttgatgtaacttccctttagagattctgtttcccctgtcttaaattctcaggctatttctgattgctgtttaaataattggtagttactatttgagtcatgcttcttaaaaaaaaaagatataaaaattcgccagctcagctttcatttaattagtatcaaagaaatgttatctgtggcagtgaacattagtagcttgttccagggtttattgtaggtttgttcaagtcagtactgcccatcttggcacttaggttcttggaatacagaggtggataaggtttgcccctcagggcttatggtcttctggggatgaagaaggtccagacgcaggaacagaattttactacagtcatgatacgtgttatcatagttgtataaatcataaacagatatcccagttgctgcctcttgtctagtcatagtttctcctttcactctcaactgtcctggtttggaagataattgtatgtgttatgaaacaatgggaacattgaaaagagacatttacctctgcctggcagagatcagggaaggcttcctggaggaaggtgctttctgagctgaatcttgaagggtaactaggagttaggccaatcacagagggcataagcaggagctggtgacaacacatagcaggagagaaagagtcagagtgggtgagagggagtgtgtgtatttgcaacgtgtgggaattaggtatatctacaaattattggaacataaagtttgtagagtgtcactgtggatgggtagagaggcagagaccagattgtgagggttccatatgccaggccagtgagcacctactctgtgccagacattgtaggcattacttacattgtctctaatctgtccaacaactcgagaggaagacatcagtatccttcaaaagagaacctaggttcaggttgggttgtaattgccccagtttagaatgtaaaaatttgaatctaactctagatcctgttctttaccggtgggccagtggactttggaagcttcagcttttgcagtatgtgattaaggagctgttgaaggattttatttgctttctattattattattactattttttgagacagggtctcactctgtcaccctggctgaagtgcagtggtgccatcacagctcactgcagcttccacttcctgggctcagatgattctcccacctcagcctcctgtgtagctgggattacgggcatgagccaccatgcccatctagttttttgtatttttttgtagagacagggtttcaccatgtcgcccaggctggttttgaactcctaggctcaagcaatctgcccaccttggcctcccaaagtgctgggattacaggtgtgacccactttacccagccatatatattttttaaattctttaaagagatgaggtttcactgtgttacccaggctggagtgcagtggctatacacaggcacgatcatagtgcactagagcctggagctcctgagcgcagcaagtgaccctcctgcctcagtctcagctgagactataggtgtgcaccaccgtgcctggcctgttgaaggattttagagctgaaagtgatgagggcaggtttgctttgctgggttgacctcagtctataacatgtaagttctaccagagcagggatttggtcttgtttactgtgaatccctagaattgtgtctggcacaaggtacgtgttccatgtgtttgttgaatgaaggatgacaacagagtcagaatggatttgaggaaagcaggactggatggagggataaatattaagaggctgttgtgttgggtcaggtaagagactggttttgggacttggcggacagatgagcgagaaagatgacacctgcgtttctgaattaggtgattatacaggctgtcaatcaaggtagggaatacaggaagaagagtgggtctggagaagaggtgaattagagttgccaattagatgaattaagagtagagctgaattagagtagataatgaaggggtatagtcagtacacaactgaatatttgaatctgaaatttgggggagaagtcagagctagaggtagagattaggtagttatcagaatttaggtagtagctgaaactgagatgataatgttacccatggagaatggaaaatctgaaaagagaagcaaagaataggaccatgggaaataggggttttattttagtaccttctccaaaccttgactttggtgctgaggtcttatgttcttccatagagagtaccttccgcagcagacctatcagacgagatcgggcacattcagggtggtatggctgtagacagcagcatcgtatcagacttctttatgttttgcttgtgacagcagtacttggctatggcagttaaatggactgtaagatgttagcttgatttggagtaccctgagtagctgcacaggtagacaaagtacaaagatattgacagcttttttcttcctttagaagaataacatatctaaaacaactcttaaagcaagagagctgcagttgcacactaagaaaatactgcaatactgccatgacttggttataggtgatgctaacataaatgggatattctgtttctcattgcaccagtcatgcagaatcatagcatcatgtgccagatggcagaacgtactgtggcagttaacaccacaaattaacaacacagtggcagaaagcaccgtttaaaaatatgggtacttggccaggcgtggtggctcacttctataatcccagcactttaggaggctgaggcgggcagatcacctgaggtcaggagttcgagactagctctagtctctactaaaatacaaaaattagtgtgtgtgtgtatatatatatactaatcaaacttccttgggaaagaaaatgtgaatgcatttctgtgtcatacatttcttgtgcagcactatatattctgtggtttagcagtattaacagcatcaagctgaacagtaaccagtgttgctaaggtctcgcatactataccatgtatgctgagaagatatgcatccttagaattgagaattagaacatttcagttaattgcagtaacttttcagtaactagatatatgtgtaatttgatttctgaagtaattttaactgtggaaaaactaagttgtcaccagcggtacctcatagcataactttagcccatgatatatggatggatggatataaatggaaattgcacactgaaattaggacgtttatatttcttcaggtattagaaaactactcggatgctccaatgacaccaaaacagattctgcaggtcatagaggcagaaggactaaaggaaatgaggtttgtattgttcttgttgcttaacatgagggtttcataggatatgtgtctttctgtagttgtagtgatatgagtaagtacacctgtgtatgtatttgtgcttctgtgtctggtagtgagatggaactatccatttcccaaattgtgtgtcgtctcagtggagggtggcagtgggtgaacatccatttgttttcatttagaggtgcagtggctttccccatctccttgttcttccttaaatcttggcatagagcttgttttttgtgtaaggagtcagggcacattttctcttgtgctgttttggaagtttcagacctgatagcctctattgtgcctaacgctacccttttctctatgccgtatcactgaagttctttcttttagaataaaagaacagtggtctcatcaacataaaaaaccactgacttttttccccttactaattgcagtcatatatgatgtgaatttactaaattttgaggtgacctttattttccaaatttatggtgtagttttcctggagaagtaacaagttagaaacatagaatttgcaggcttgaaagccaggactatctttcatctttctttttcctcatcctaacttcaaacttaaaaaaaaaaaaaaaaaaagctgggggtagtggcccatgcctgtaatcccagcactttgggaggccaaggcaggcagatcacttaggtcaggagttcgagaccagcctggccaacatggcaaaaccccgtctctactaacaatacaaagattagccggcatggtgacgcatgcctgtagcctgtagttccagcttgggaggcggaggctggagaatcgcttgaactcaggagacggaggttgcagtgagccgagattgcaccactgcactccagcctggacaacagaataagactgcatctcaaaaaacaaaacaaaacaaaaaacaaagaaagtacttaaatgaggaaagaggagagcactacacagtccttgcctgggactcagagcaaacttcatgtttttgctagtcaaacttagctgctttaattgaccttttagggtcaaaaggccttcactttccagttgtcagttcaaacgttctcaagttgatgttttgtggggagggaagattgagattgtctacatcacatttatttgacttgtacttatccactgtgtagtgttataattgtgctttatttttgtttttatgggctatttcccatcatgctgctgtctgcactgctgttggaccactttgcctatagaaggtaaatgagtccctttgggacatatggaattgagaaccttaacttgtttctgcttcttgttcttagaggaattatgaagcagtcatgatggctcatgatgagtgagcagctctgtaatttgtagacagaggtataatatgtaggagtcacagaagagctgtgccagcatgctgttccccttgtagcagagatgctagcacacccacttgatactccagattttgcatagggtttcttttagagattggttcttggtgaaaaattttttagcatccagtgtgttccaaggcaaaataagtaatagttttttaatggtttttttagactcagaatttatttttaacactgcataaattagggcttctagttctgaaaaatgcaaagaggcttacttaagctatttatatattttttaacatgctggggagagggaagagagggtgcacaggtgactcctagcactaatatgctagtgccaaactcagttaatattaataatggtcatttgttgatatttttggtagcttttctatttaaagattcagtaagtagcatcctttgcactgaattgtcacgttttgtaacctgctgttgtggcagggaccatgaaacaacttagtatgccattgtttcagtttattttttaagcattactgggaactaaatccacttgacttactttttgcatttaggtttaaataattgttcctgggtagatacagaataaaactcaatctccccacttccagcagagaaaaaacaaatgaaatactgttctttttgtgtacttactagaaaatgtttaactggaaaaaaagttctgcttgttttattggcacagcaccattgattctgtgattctttgtcatagtattctgtggcagtttctgagtatgatatgtagattgaaatatagaggctaggaaacttttaatagtaaaattttactaaaaatttattaacttattaaaatataacttgaaaaaattgtgaggtttttctaaatttcttggaaatttgatttatattgtcaaaaagcactgaagaagtgttagttatggatttcgggtatcacataatgtttattccagagttttctgagtgtgatttatgtgaatttcatttggttattcttttactattttcacagtgaaattgtcatgagattttttcttctgtatttcttgcttagcttcttctcatttaagaatgagttggagggattaggtctttaagtaggcagatggattgtataaccctcatccattcttttgtggttttacagtgggacttcccctctcgcatgcctcaatgctatgctacattccaattcaagaggaggagaggggttgttttataaactgcctggccgaatcagccttttcacgctcaaggtaagtgatatgaactctcttttggtgcagtgattcttggacttttaatgtgcataaaaatcacctggtaggtctggaataggggccatgaatttgcatttctcatatgcagtcaggtgacactgatgtttttcttttttttagacatagtctcgctgtgtcacccaggctggagtgcaatggggcgagatctcggctcactgcaatctctgcctcccatgttcaagtgattctcccacctcaacctcccaagtagctgggactacaggcacatgccaccatgctcggctaatttttttattttttttaatagagacggggtttcaccatgttggccaggctggtctcgaaatcctgacctcaggtgatccacctacctcggcctcccaaagtgctgggattacaggcatgagccaccgcacctggccagatgctgttggttctaaatggcactttgaggtgttctaatatgaatcagatattagaaattatttagtcatagcagctcttgtttgtgtgttcatcttttcttgtctatatctttgtagattgtacaaaactgaagcataactatggggataattgcagatgtgcctttttttttttttttttttttttattctgagatggagtctcactctgttgcccaggctggagtgcagtggtgcgatctcagctcattgcaccctccacctcccaggttcaagcaattcttctgcctcagcctcctgagtagctaagagtgcactaccatgcccaggtaatttttgtatttttagtagagacggggtttcaccatgttggccaggctcgtcttgaactcctgaccttgtgatccgtccgccttagcctcccaaagtgctgggattacaggcgtgagccactgcacctggccacagatgtgccttaattaggattttgttgtagtaatgatgtgaaggataaattactggtcagctaatgtaagacctactctatggaaaataactgaaatgtgaacatatttgtggaaattaagtgacagtaattataaagtaagagtacttaaatcaggtagagttcataataaagcttaaatagggccgaaatgaacaggctaattatttttccaccatttgtgatatatatggtaatcatttagaccgggggtctgcaaagtttttctgtaaaggaccagaaaatcaatgtttttttgttttgtggatcatactgtctttgtcttaaccactcaggtctgccattgtagtaggaaagcagccatacccaaatgaatgggcatggctgtgttccaaaaaaaaaaaaaatttatttacaaatgtttgttttacttacgaaaacaggctgcaggccagatttgatttggggctgtactttgtcgacccctgatttagacataagatgacttgtcgacattggagaaactgaaaatttgatgctgaccctttcgttcttccatagtgggttataaattttagcagtcagtacaaactttttcctttaagttttgttttcttgatggactgtattcaaaataaatacctgaacaaataccaactatataacatgaagccataaaacttggtctttatatataaataaagtttatcttggggtcagatgtctgtgctgttttctatatttttttatatccaatagtttggtctttttcctttcagttttgtatgcttttcttgtaatcgagccttggaagagacagagccactgagcccaaaacctagctttgtggtcggctgtggtggctcatgcctgtaatcccagcactttgggaggctaaggcgggaggattgcttaaactcaggagtatgagaccttgtctctattaaaaaaaaaaaaaaaaaaaaaaagccttgcgtggtggtgtgtgtgcttatagtcttagctactcaggaggctgaagcaggagggtagcttggagatggaggctgcagtgagctgtgatcacaccactgctctccagcctgggccacatagcaagaccctgtctcaaaacaaaaacttagctttgtaacctgggagggatttaacccttctttttggtggaatatgcatccctggcattgagtcagtccttaataaatgatagcctttatgatgatctgaggtttatcattcttaattgcctgttaatggcatttttctattaatattatctattttttgagatagggtcttgttctgtcacctgggctggagtgcagtatcatagtcacagctcactgcagccttgacctactaggctcaagtgatcctcccacctcagccttctgagtagctaggacttcaggcgcataccactatgcctggctaattttttgtattttttgtggagaaggagttttgccatgttgcccaggctggtctcgagctcctggggtcaagcgatccactggctttggcctcccaaactgccaggattacagacgtgggccactgcacctggcctattattttttaatttaatattaatttatatttttagaaacagggtctcacactgttgtccacagctggagtgcagtagtataatcatagctcaccgtagccttgaactcctgggctcaagcagtagtcccacctcagcctcccgagtagcgtacaccatcaccccagctaatttttaaattttttcctagagatgaagtcttgctatgttggttaaactggtctcaaactcctggcctcaagtgatcttcccaccacagcttcacaaagcactgggatggattacaggtgtgagcaaccatacctggccctctattatctcatatatagcttattgttacatatgctgtaattatatatagttataattatttaatacatatatgtttattacaaatatgcctgttaatggtatattctgtttttaaaaggaaggataattacttttttctatgagtaccttaagggcaggaactgagttttatttgtgtttgtaatttggctctgggcagaattcttggcatagtacgtgctttatgtgtgaactgaattatatttcttcatcttaattttacaggtgtgagccactgcaccaggccccttcatcttaattttaatatatctttgaataaacaccattgtatgaacctgctgtaagcttgggagtggtctgttagtctacagcttgtgtctgagatgtgctaattgaatatttgctcagtacctcatcttaactgcctttggctttatgttgcttatccttcatagtatcttgttcattggccttttacatccataggcatcacttctctgatattcgttgtgctcttttaatggattaatggtttgcttggttggttcctctagttagactgtaaactccttgagagcagagtctgtattttattaattacccacagtactaggtacatagttgccttcaataaatatatatttaatgaacgaatttagtgaataatggctacatttttgtacttcgttattatttatttattttttttttctgagacagagtcttgctctgtaacccacgctggagtgcagtggtgtgatcttggctcactgcaacctccaccgcccaggctgaagtgattctcctgcctcagcctcccgagtagctaggactacaggcgtgcaccaccatacctggccaatttttgtatttttagtagagatgggattttactatgttggccaggctggtcttgaactcttgacctcgtgatccgtctgcctcggcctcccagagtgctgggattacaggtgtgagccaccgcgcccagccttcattattcttttgacatttgatgataaatactgtttatgattttctttttctttttttttttttggtagagacagtctcgctttgttgcccaggctggtcttgaacttttggactcaagcgatccacccacctcagcctcccaaagtgttgggtttacatgcatgagccacctcgtgtgtccttgttcataattttgatgggctgggcgcagtggctcacgcctgtaatcccagcactttgggaggccgaggtgggtgaatcacttgaggtcaggagttcaagaccagcctggccaacatggcgaaaccccgtctctacgaaaaatacaaaaattagccgggcgtggttgtgcacgcctgtaatcctagctacccaagaggctgaggcaggagaatcactttaacccgggagatggaggttgcagtgagctgagatcgtgccattgcactccagcctgggcaacaagagtgaagctccatctcaagaacagttttgatgaaattgtccctagatttgcatctggcatctagctcatatctcagagccagaatgaaggatgcttacctctgggtttggtaaattttagcttggttaattatgtgtgtgccttaatttttttgacctattataaaagcaatatacgtaaatgcaacagagaaaatgaaagtaatccataaaattctacctgtggccagctgcgatggctcatgcctgtaatcccagcactttgggaggttgcggtgggtggatcacttgaggtcaggagttcgagaccagcctggccaacatggtgaaaccctgtctctactgaaaatgcgaaaattagctgggcatggtggtgggtgcctgtaattccaggtacttggggaggctgaggctggagaattgcttgaacccgggaggcagaggttgcagtgagccaagattgcaccactgcactctagcctgggtgacagagactcttaagaaaaagaaaaaaaaattcagatacctgtaacctaaataattaatatttgaaaaaatttcatcattgcttctttcattcagttaatatattttgaaccacttgccatggtgttatatatagacatgtcttatatatgtgtatatatatgtgtgtatttatttattttttgagacagagtctcgctttgtcatccaggctggagttcagtggtacaatcatggctcactgcacccttgacttcctgggctcaagcaatccttccagcttccctagtagctgggactacaggcgcatgccaccacacccagctaatttttgtagtttttgttgaggtgggaattcactagtcttgaattcctgagctcaagcaatcctcccatcttggcttcccaaagtgctgggattataggcatgagccactgtgctcacccagttttttatttttagatacagggtctcgctctgtggcttaaagctagatggtgcagtggcaccatcatagctcactacaaccttgagcgcctgggcttaaggaatcttcctgtcagcctccccagtagctgggaccacaggcatgcaccactgcacctaattaaaaaaaattttttttatagagatggagggggtctcattttgttcctcaggctagtctcaaactcctggcctcaagcaatcctctgcttcagcctcccgaagtgctgggattacaggtgtgagccacggtgcccggccccttattctttttgaaggctgttttaagaattccagatttccagccatgaatgtgtgattactaactagtctcttgttatatgcctcatcaacaccacacttctcccagaagttgtgcaggcatttagtttattgttactcaggaatggatgagaaaggatatcaaagatctgaaccagctgattaccatcttggtcacttgagaactcaggtctgtccaataaacaccctaatccaaggtggtgttaaatacatatatatatatttttactttacgtttatttattttgaaaaatttcaaacctatagaaaaattgaggcagtaccatagtcttagtccattttccattacttagaatatccaaaagtgagtaatttataaagaaaattaatttatttcttacagctatggaggccaaggtcgaggggacatatctggtcagcgttttgccatgttggtcaggctggtctcgaactcctgacctcaaggcctgccttggcctcccaaagtgctgggattacaggcataagccaccgtgcccagccacctctgagcactttagatagtatgtcttaagaacaaagacatagcccggcgcagtggctcacgcctgtaatcccagcagtttgggaggctgagtcgggcggatcaccttaggtcaggagttcgcggcaaaaccccgttactactaaaaatacaaaaaattagctgggtgtggtggcgtgcacctgtaatcccagctactcgggaggctgaggctggagaatcacttgaacccaggaggcagaggctgcagtgagccgagatggcaccactgcactgtagcctgggtgacagagcaagacttggtctcaaaaaaaaaaaagaaaaaaagaacaaagacattttcctatataaccacaatgccgttatcacactcaagaaacttaacattgatatgattgtgtataatacatagtccatattcaaatttttctctcatttcaaaattattctttgtggcctaaaatcctgtatccaatcatgatatttttgaacaatccagactagttgttgtatagaagtaagtagtttgttttttttgttttgttttgttttgttttttgagacagggcctggctccgttgcccaggctggagtgcagtggcatgatcacggcttactgcaacctctgcctcctgtgctcaagcaatcttgtgcctcagcttcctaaataactggaattagaggtgcgtgacaccacgcctagctaatttttgtatttttaatagagatggggttttgtcatgttgcccaggctggtcttgaactcctggactcgaagcaatcctcccacctcagcctcccaaagtgctgggatttataggtgtgagccaccaggcctggcagttaagtacattttttaaggactaataaaaatgtagaaatcttcgttatttccggaatcctttatgttttactgccagtactaatgtagtaatgccagacagtagtcatgtctactgttccaggttgtccaaaggattcagcagcaaaggatgaaagtggtgggaagttttgcatagtggtcgaccaagggctagtttggtgagtgtcttgcctatgataatggacaggaagacaccagttattttattttatttttattttattttattttattttaattttattttgtgttgtgttgtgttatctttgagatggagtctcactgtatcacccaggctggagtgcagtggcgcaatctcggctcactgtaacctctgcctcccgggttgaagtgatcctcctgcctcagcctcttgagtagctgggattatatgcgtgagccaccacacccgactaattttttgtatttttagtagagacagggttttaccatgttggccaggctggtcttgaactccttacctcaggtgatccacccaccgcagccccccaaagtgttgggattacaggcgtgagccaccacacccagctgacaccagttatttaactcacatttctctgttttccttttaaaggtagtagtgacacctttgaaatcttttggcattttctttgcctgttctcccttatgtgttaaggataagcttacgtgcagaatggcttgttaagttttttctcctccgtacttggaaatctcatctggtgggacattagggtcagaattttgtatattatatattatatatctatcatgatatatataatgtattttatatattatatattatataaatatcatgatagatatataatatataattatatgttatatattttatatttataaaataaaaataaaaaattgcaattattttcaaatagtaaaaccacgtagataaaatataattctggccaggcacgtggctcatgcctgtaatcccagcactttgggaggctaaggtgggtggatcacctgaggtcaggtgatataatatacaacagatataatatgtctattatatattatatataatgttatatagatatctatattatatataatatattaatagatatattaatataatatatattatatattatacagatatctataaatatattatatataatatattatagatatatctatgtatattatatcacctgacgtcaggtgatccacccaccttagcctcgcaaagtgctgggattacaggcgtgagccacgtgcctggccagaattatattttatctacgtggttttactatttgaaaataattgcaattttttattttattttttggttctggaaacatttgtgtggacttacctatgattgtcaggtttactgatttgctggagattttttgggcatgacaaagggtttcttctttgataaaagtttttctgggtaatgtgatggtacaggttgagtatcctttatctgaaatgcttgagacatgaagtgttttggatttgagaatttttagcatcttggaatatttaccacatacatagtaaggtaccttgaggatggggcccaagtctaaacacagaattcatttgtgtttcatatttatcttatatgcatgaaacaaagttgtttgttttcttttttttttgagacggagtctcactctgtcgcccaggctggagtgcaatggcatggtcttggctcactgcaacctccgcctcccaggtccaagcgattctcttacctcagcctcctgcgtagctgggattacagacatgaggcaccatgcccggcaaatttttgtatttttagtagagatggggtttcaccatgttggccaggctggtctcaaacccctgacctgaagtgatctgcctgcctcagcctcccaaagtcctgggattacaggtgtgaaccaccgcacctggccccaaaataaagttttgactctgtgtgtgtgtgtgtgtgtgtgtgtgtgtgttttggagacagagtctcactctgtcgcccaggctggagtgcagtggcatgatcacagctcactgcaaccttagcttcctgggctcaaatgatcctcccactttagcctcccaggtagttgggactacaggtgcgtgccactgtggctgagtaatttgtgtgtgtgtgtgtgtgtgtgtgtgtgtgtgtgtgttttaatagagatggggctttgccatgttgcccagcctggctcttgacctcttgggctcaagccatctgcccaccttgacctcccaaagtgctaggattataggcgtgaaccaccatgcccagcctttgactgtgttttgatggcaacccatcacgtgaggtcaggtgtagaaatttccatttttggcgtcaggttggcactccaaaggtttcagattgtggagctccttggagttttggattagggatgctcagcctgtacatttgacagtttatttacagatgcttgcatcagtgcttggagctagtcctcagtggtgggataggtgaaaattatctctactttgagttcttgatttgaattcttttttcttaagcttttcctaaagtcatgtgtcagtgttgattattgcccggttagaggtaggatttgtattgtttttttacacttggaatttcctgttgtcataagatcactgtgaactcccttgtagtgttgtacattcttaggactttcatgctgaaatactatgcttttataaaatggttgttgtgtctttgctgagtttaaatagggtccaggccaggcatggtggctcatgcttaccctgtctcaaaaaaaaaacaccctcaactaaatatagttaaataggccaggctcggtggctcatgcctgtaatcccagcactttgggaggcggaggcgggcggatcacctgaggtcaggagttcgagaccagcctggctaacacggcgaagccctgtctctattaaaaataaaaaaaaaacctagccaggtgtggtggtgaacgcctgtagtcccagctactcgggaggctgaggcaggagaatcacttgaacccagagacagagtgagactctgtctctcacacacacacacacacagataaataaattgggttcataaatggtgattccagcactcactgtcaggtataacttcagtctttttttttttttttttttttttttttttttttttttttttgagacagagtctccttctgtcacccaggctggagagcagtggtgtagtctcagctcattgcaacctccaccttctaggttcaagcagttcttctgccttagcctcccaggtagctgggattacaggtgcagaccaccacgcccaactaatttatttatttattattattattattattattttttagtagagatggagttttgccatgttggtcaggctgactttgaactcctgacttcatgtgatccacctgccttggcctcccaaagtgctgggattacaggtgtgagccactgtgtccagccaacattattcacttttgttgttacataagatgtcacggccaggcatggtgggtcacgcctgtaatcccagcactttgggaggctgaggtgtgtggatcacctgaggtcaggagtttgagaccagcctggccaacctggtgaaaccccgtctgtactaaaaatatgaaaattagctgggattacaggcgggcacctgtaatcccagctactagggaggctgaggcaggagaatcacttgaacccgggaggcagaggttgcagtgagctgagatcgtgccattgcactccagcctgggtgacagagcaagactgcgtctcaaaaaaagaaaaaaataaaaaagatgtcagttatggctatttgtactttattatacttcatgtgatgatatatggttcagcatcagggtcttttttcagttaagttcagttgaacccttttcctgtttagaatattttttaaaagtataaaaaaacttaataaaagaaatggatggctgggcatggtggctcacccctgtaatcccagcactttggtaggctgaggcgggcagatcacctgaggtcaggagttcaagaccagcctggccaacacagtgaaactccatctctactaaaaatacaaaaattagctgggcgtggtggcggccgcctgtaatcccagccacttgggaggctgaggcaggagaatcccttgaacccgggaggcggagattgcaatgagcctattgcgcaactgcactgtagcctgggcgacaagaaggagactccgtccctcccataaaaaaaagaaatagatgactacatttaaaatatcttccatttaaatccatagtttacaaataaaggaaaaagcagtggaggaagagagtgagataattacttcatttttacaatgttaaataattacaattaaaatttttgtgtacaattccacatttaatagcaatttgcaaatgccttattgccaggtgtggtgtcttacgcctgtaatcccagtactttgggagcccaaggtgggagaattgcttgagccctggaattcgagaccagcctgggcaacatagcgaaacttttgtctctacaagaaataaaattagccaggtgtggtagcctgcatctgtagttggaggtactgggggagctgacgtgagaggattgcttgagcccaggaggttgaggctgcagctgacatcaagccactagactctatcctgggcgactaattgagaccctgtctcaacgaacaaagaaacaaaaaaaacccaaatgatttacttaccattaaataccaagaaaagaatgactggagtaagcttagatttagatacaacaaaatcatggagcttatcatttgaaaggcatttttgacttttcataggtgtgtagcaagcaaagtggtccttttgaaaaatgcaagtcacatcatgtcacttttctgcttggcctttgcctacttctcgaatggttctcctagcacattctaactggtcattattcattgtgtttcagccattctggccttcaacctatttctcaaacaccccaatcttgggtatactttagggcccttgcatttgctagctcatttacctggaaaattctgcggtaacttcttgcacataataggtgctaataaatattggctgcatgcaaccaaaaaagctggcttcggtagtagaagtagtagaagagaacattaccaaagtccttttttttgagacaagatttccctctgttatttaggctgagtgcagtggtgccatcacggctcactgcagccttgacttcttggactcaaatgatcctcccacctcagcctcctgagaagctgggaccacaggtgtgtgtcaccatgcctggccaatttttttatttgtagagaagaggtcttactgtgttgcccagaatggtgtcaaactcctgggctcaagtgatccacctgcctcagcctcccaaaatgctgagattataggtgtgagccactggtccagcctcttaccaaaatctttttttttttttttttttgagacggagtctcgctgtgtcgcccaggctggagtgcagtggcgggatctcggctcactgcaagctccgcctcccgggttcacaccattctcctgcctcagcctcctgagtagctgggactacaggcgcctgctaccacgcccggctaattttttatatttttagtagagacggggtttcaccatgttggccaggatggtctcgatcttttgacctcgtgatccacccacctcggcctcccaaagtgctgggattacaggcatgagctaccgcgcctggccgcctcttatcaaaatcttaaacttgttaattcttgtatctcaccttgcttttatatcagtttttgttatagaatgtgctttctttttaggttatttttcttctgctcagcaagttaactttgaagaatcttttttttcttgccttttttttttttttttgagacagaattttggttttgttgcccaggctggagtgcaatggcgcgatctcagctaacggcaacctccacttcccgggttcaagtgattctcctgccccagcctcccgagtagctgggattacaggcatgaggccaccaggcctggctatttttattttttattttttatttttattttttactagagacagtgtttttccatgttggtcaggctggtcttgaattctcgtcctcaggtgatccacccgccttgacctcccgaagtcctgggattacaggtgtgagccagcgcacccggcctcttgccctctttagagcagttctacataaatctgtggaataatctgctgacgttagaaataaacctttctcagggtgtggccataatctggttcgttgtaattgctgaaggaaaaaactgaacccttaggaacagtttaaacattctaggtggtttttagatatattattcctgttagagttttgaactttgatcatcttgttagaaaaaagaggccaggcactgtgcctcatacctgtaatcccagcattttggaggctgagtcgtcaggaagtcacttgagcccaggagtttggtaccagcctgggcaacatatggagacctcgtctctacaaaaaaaaaaaaaaaaaaacaaaacctgttagccaggcgtggtggctcatgcctgtgttcccagctactcaggaggctgagatggaaggattgcttgagcctgggaagttgcgactgcagtgagctgtgattgtgccactgcactccagcctgggcaacagagtaagaccctgtctcaaaaaaaatgaatttttgcattcatttaaaaatgaatggtagcaacattttagataataacttatgtagtctgtgtgaatctcatcaaatatatgtgatttttaatgcttggaatcctagaattttagtgagggaggagctctcaagttatctaatttactgtcattttacagataaaaactaaacttctgatagatgaaaggatttataccatacatctatatgataattgcatatggctgagttgaggttagaacccaggacccaatctttgatttgatttcttttcattatgccaatttagaataaaattttttctcttggttttctgacctttggccacttcatcttttgaaggatcttgtaagttccttgatatttctcaaaatgtcagttttattctcttcaatgaaagttcttgttaggtgaaagtagcctttcatatccttaaatgtgaacctgttccttaggctggagtttttgtactctccattatattggcatttatagttgttggttttcttttttttttttcttttgagacggagtctgtctctgtcgcccaggctagagtgcagtggcgcgatctcggctcactgcaagctctgcctcccgggttcacgccattctcctgcctcagcctcctgagtagctgggactataggcgcccgccaccatgcccggctaatttttttgtatttttaatagagacggggtttcactgtgtttgccaggatggtctccatctcctgaccttgtgatcctcccgcctcggcctcccacaagtgctgggattacaggcgtgagccactgcacccggccagttgttggttttcttttctgtgccagattgagtgatatatggtggtactaagagcactggaataggagtcaaggactgaggtacagcatagcacctcatgtattacttggtatctccacttgtctctaacactgaagaggtataattggttgtttaaaaactgtgggtgtaaaacgctagtatcccatgaaatggaactgcagaatataagtggatgactctgaaactgcttttgaaacaagcatgagggctcagtttctccatctctcgtgggctccaccatcactgtctgacatcctgatctcctaaggcatctttcctccatcccagagctctgttgaaaatctcttgggctaaaaaccagtacagaccttctgatactcacgttctagcctttttagattgttgtgtgtgaagagtaagtcagctgtggatatttttctttcctattttgtgaggcatttggtatttactggaggctgcctgttttgttgcaaaccttgttccactgtgtactataggaggtctgctcagaaagcctagttagtagagcagtaccatttgctttggtcaattgtagcagcagtctgttttttttttttttttttttttttttgagacagagtcttgctgtgttgctcaggctggagtgcagtggtgtgatctttgctcactgcaacctccgcctcctgggttcaagcgattctcctgccttggcctcccaagtgggattgcaggtgtgtgccaccatgcccggctaattctgtatttttaatagagatggggtttcacccccaggctggtcttaaactcctaacctcaagtgatccacttgcttcggcctcccaaagtgctaggattacaggtgtgagccaccgtgcccggccagcaatctggttttaaaggaggctttgacccctcatttggtaaaaggttccttctttgactaattcccaaaggacatctcgatctgtcttcaaaagaaggggtattccgttgtcagtattcctagctagctctgggagaagagagaacttgattgttttcagggccctggtcagagtctggttttatgcccaagggatgaactgccttttgtccttctacctcctgaagttcagagccctgtgaaaatgaagtggtaaaggtcaagtagcagtagtttgaaaagcaccagcactgggacgattttgtggtagcctagcagagtgggcaggatgcttacttcagaggtgctaaagatgtatttttttttggaacaagaaggttataaatgtttctattaagtttgattttaaagcatgagggttctgggaaaatgagaagattgtacatactctaggcttccttgggactgcatttgaaaaaaaaaaaacttttctttgggtcagccagtatgaaaactgcatttgatctcaatccttcagatcaggcttttggggagagttagttgaagaatttgtttagtctaagaaagttgcttctagcttagctaaatctggaagaaaaaatggaacctgatgtttgagtgctaactgtattccagacagacgttatactccttatattggtccttttgaagcataaatatgtttccaagtcctataataatgaggaaattgcctgtgagagtttaagtaaattgtacaaagtaacacttttggttcagagatttgtttttaatacagagaggacaggttaggaactttgaagcttcagctaaatgagtcagttctcaaatgtttgagaagcatgctcaaggatctggaggaatagcttaattaatttgtacatcatgagaggagtagggagcaaaaatatgtataatttcttctgaatgatgctgtcttttttgatgcagtggtgctaaatgggctttgcttgtatgatacttcttaaatgcattagctaattattttgttttagtcttcttttttgaaatacagatgactctttgagctggttttctttggaaagttatctgtcctgacaattctacttctaaaacttcaactttttttttttagtcttcatttccattgccaccaccctatcctaaattatcccgttatgctggatactgaaatagcttctgcctggtctacttactttcacttcgcccccttacgatccagtgctttgctccttttaatccagtggccagagggatttttttcaaaacataatttgattataacagatctatgtttgatacttatccatggtttcccatggcagttgcagaaaaatccaaaccttgtttggccacactgcccttctttcagtaatttgaattccttaagctttttccagtttcaggatttcccattttgaactctttctcctccactttttcctggccacaggtttcaagagctgacaacttacctcagttcttaagaggatccttcatttatctctaaattggattttcctgtgtccaaaccttacttgttatcacaagtttataattatttgggtgattgtttgatgtgtctctcctgactgggccttaggggcagagaatctgtattattttgttcttgtttatatccctaggagctcttatggtaggtattcaataaatgtttgttgaataaaggcagtggaaaaacacatagaagaggtgctgtggcagcagttctcagtgccaacagttgaattggtttacaatagtaatttttagtgtcaacaaggagatgtgtagtatggaatgtttattagcaagatctttttctcatggaatggaatgtttgaaaacctccaaagtgtaagtttttttttttctcaaaagaaaacagtcatatttggggttacttttttttttgagacagagtcttgttctgttgcccaggctggagtgcagtggcatgatcccggctcactgcaacctccacctcccgagtttaagtaattctcatgccttagccactggaatagctgggattacaggtgtgtgccaccatgcccagctgttttttgtataattattagagatggggtttcgccatgttgaccaggctggtctcaagctcctggcctcaagtgatctgccagccttggcctcccaaagtgctgggattacagatgagagccaccgtgcccggcccattgttacttctgaaatcgaaatcaaatgccatattgattcctgatcttttgtgtatgacctctctctctcttttttttttttttttgctacctctccccgaaagtttttaggatctttttttccacgattatgtaccttgatgtgggtcttttctcgccctttgtgctattaggtctagcaactcatgtgtctcaggtctgggaaatgattttacagtttttccagctggtgcgtaactagctgtttgttctgatactgtcagtatttaactttatgttagaaacatttcataatgcaaatgaaaaatttaagccaggtgcagtggctcatgcactttgtgaggctgaggtgggaggaacacttgaggtcaggagttcaaaaccagcctggccaacatggtgaaaccccttctactaaaaaaacaaaaaaacaaaaattaactgggcatggttgtgcacccccataatcccagttactcaggaggctgaggtacgagaatcactggaactgggagacaggtttcagtgagccgagactgagacagagcaagaccctgtctcaaaatataaataaaatacataaaaaatttaatattatgtatataatatccagcccaggcttttctatttgtcatgccctgtttctttcacatcatagccttactcagatgcctgctgatccttgattgaggtgtgatgcttgagagtcaggctcttaaatactactggcgaattcagtgcattgtggttttgtgacttcacttgtctcttacagaagtggggaagtggtttttacttcgatgcatggttctgaagtagagatgtctatctcctgatgcacactttaaataatccccatgttttccactccatactccatccttgtctggtttaagctcttagcctgtctgcagttcaggggatgaatctgcttggttcttttcagcatctccctctgcaacgcttagatctcatcttcctttgctttgctaactattctctttgcttctccatttgtttctctgtcattgatgacttccaagttatatccccatcctggatattccttttgaacgtcagactcatatattcagttacctcctcagtatctctattcggatatctaatggcatctcaaaattaacatgtgcaaaaccaacctgttccacccttgtgttggctgtataaattagtgggaactccattttttaagttgcttaaatcagaaacctgggagtcatcaattttggagtctgtccctttgctcttgtggcacatgtaatcacgaataaatcctgttggctctatcttcagaatatatctcattttatcactctctctgccaccagagtggtttaagccaccttcatctcttaggttattttagtagcttcctaactggtctccttccttccattcttgccaccttcctcaacaccgaagatatattttatttatttatttatttattttgagacagagtcttgctctgtcaccccagctggaatgcggtggcttgatcttggctcactgcaacctctgtcttccaggcttaagcaattctcctgcctcagcctcccgagtagctggggctgcaggcatgcaccaccatgcctggctaatttttgtattttttagtagagatggagtttcaccatgttggccaggctggtctcgaactcctgacctcaggtcatctgcccgcctcagcctcccaaagtgttgggattacaggcgtcagccaccatgcttggccaaattttttattcctttgggtaaagagatgtattttatttcctttaatttggtaatatagtgagttatgttaatagattctttttttccagtgctcaagcatccttgcattcctaggataaatggtacttcaacatgattttccttttaaatatacattgctggatttaggttataaattattgagaatttttgcatctgtatttacaagtgttacattctaatttcaggccttttccagttttattatcaaaacaagctgtgctgtttttcctctcttgattctcagtagtagtctctttaagatagtgattattcattctttttggtagatcatgcctataagacctgggcatgtatgtttttattgtgggaatatattgtttttactttccttgttatgaaatatataatttattttaaaatatgtatatacagagtttgtgttcctttaaagaataatagctaaaaataaattgcacgcccccacatccaaccatcgtcaaacaaaacatcttttacactctattttatttatttattttcccccacccctctagagtatacacccttttggagcctctgagcattttcctttccctcactgctttagaaacctctattcagatttttcatattaatgattcttttgcttttaacccacatgtgttactgaagtttaagtcctaaataataatttttcctgctttaaaatatatttttatgtcaatgaaatcatactggtggatgtattttctctgatttgctgcttttgcctctcatttctgagcttgatctatgttggtgcatttatagaaatacttcatattttctgctgtgtatcatcttatgctatcaacgtgccatatgatttacctgttcttagcatgtatttgggttgtttctggttcttgctgtaacaaacagctgcatttagtgcttgtgtatgtgtctcctgatgcatgtgtgcattcacttctctggggtgtatatgttgctgggaatgggactgagtattgtgagtgtataatagtatcttgtttttgttttttttccctctcagtttatggcataatttacgtacagtaaaatttaccaccgcccccctgccccgcctttttctttttctgaaacagagtctcgctctgttgtccaggctggagtgcagtggcacaatctcggctcactgcaacctttacttactgggttcaagcgattctcctgcctcagcctcacaagtagttgggattacaggtgcctgccaggctaattttgtagagacagggtttcaccatgttggccaggctggtctcaaactccttacctcaggtgatccacccaccttggcctccccaagtgttgggattagaggtatgagccaccacgcccagccaaattcaccctttttagtgtacaagtatacagctttgtgagagtttgatttctttagttcaaatttgttttaaagttatatttggtattttaacagtgctatttaaatatatgccatatatggcttgaatgcaattatcctagtacagatggtccttgacttatgatgtttttgtgtccctgtaagcccaccttaagttgaaaatattaagttgaaaatgcatttaatatgactaacctgctgtaaatcctaacttagcctaccttaaatgcacttagaacacttaaattagtttacagtgggcaaatcatcaaacacaaagcctatttgtaataaagtgttgaatatcttatataatttattgaatactaaagtgaaaaacaatagttgtatgagtagtcagagtatggcttctcttcaatgcatatcactttcatataccatcgtaaactcaaaaaatcataagtcagggtatgctgtatattttattggtgctaacatacttccattttaaaatacaggaaattcacctttttttgtgtatagtcttgtaagttttgacagatctatatacagatatgtaatccccacccatgattcttttttaatttaaaaaaatatatttttgagacagtctcactgtcacccaggctggaatgcagtggcatgatcgtagctcactgcagcctcaaactcctggccttaagtgctcctcctgcctcagcctcccaaagtgctaggattacaggaatgagccagtgtgccctgccaccaccataattaagatccagaacagtttcatcatcccagaaactttccctgtatccttttgtagtcagcttcttttttcacccccagctcctggtgaccactgatttgttctctgtccttgcagtactgtcttttccagaatgccatataaattgaatcctacattatataacactttgagtctggcgtcttttacttagtgtgaagtatttgagatttatttgtcttgtgatgtgtattagcaatttatttcttttttcttttttttctttttggagacaaggtcttgctctgtcacccaggctgaagtgcagcggcacgatcatagttcactgcaggcttaaactcaagcaatcctcccacttcagcctcctgagtagctgggactgcaggcgcacaccaccatgttcagctaattttttttttttcttggtagagacaggatctcactctgttgcccaggctgatttcaaactcctggcctcaaggaatcctcccacctatgcctctcaaagtgctgggattacaggtgtgaaccattacagttggctagcagtttatttctgtatattgcaggatagtatctcattgtatagatgtaccacattttgcgtattcattcttcagttgatagacatttggactacttcctccttttggctgctgtgagtaatgctgctgtgaataaatatttgtgtgtaagtttctatgtggacatacagtttcattattcttgggtagataaaccttggagtaattgctgggttgggtggtaatttctgtttaacttttaaagaaatagctaagctgttttccaaagtggcttcaccatcttaaattcaagtttttgttttcgttgtatttgaggcagagctttactctcttgcccaggctggagtgcaatggcaagattatattatagctcactgcagcctcgatcttccaggctcaagcgatcctctcacctcagcctcccaggtagctgagagtacaggtgtgtgtcaccatgcctggctaagttttgatttttagtagagataaggtctggctatgtttcccaggctggtcttgaacttctgagctcaagcagtcctcctgccttggcctcccaaagtgctgggattgcaggtgtgagccaccaagcccagccaaggtttttgtgttttagtaaaatttctgctcttcctggcaatacttttttctgaaatttactttgatattgatatagtcactccagttcttttcagtgcttagtttttgcatggtatattttttccatccttttgtgttatactgtctgtttcattatatttgtagttggaccttgattttttttttttccctaattcttttacttgggatgcttggacctaatgtgtgtctagtttttcctaatgtgtcttttacttgggatgcttggaccatgtgtatttaattattgatatggttgggttaagtccaccatctagctatttgttatttatttatttttagagccaaggtcttgctgtgccacccaggctggggtgctagtggcatgatcatggctcactgaagcctctaacttctgggctcaagcagtcatctcactgcagtctcccgagaagctgggattacaggcgtgtgccaccaagcctagctgattttttttttttttttccgagatggagatttgctcttgttgcccactctggagtgcagtggcgcaatcttggctcaccgcagcctctgcctcctgggttcaagcaattctcctgcctcagtctcccgagtagctgagattacaggtgcctgccaccatgcccagctaattctgtatttttagtagagatggggtttcactatgttggccaggctgatcttgaactcttgacctcgtgatctgcccgcctcggcctcccaaagtgttggaaggccgaggcgggcagatcacgcctgtgctgggaggctgaggcgggtagccactgctcccagccctgaaatctttcctcttttctaagatagacatttaatgcacacacacattttgatatgctatgttttaattttcattcagcttaaaatatctaatttttcttttgatttattctttaacttactgattatttagaagtgtgatattatattttgggaataaaaatccagagatcttactgttactgatttttgatttaattccattgtggtaagagaacataccttatatgatttgaatccttttaaattgattgagacttgttttatggatcagaataaggtgtcttgataaaggttccacgggcacttgaaaagaatgtgtattctactgttgttaggtagagcattctattaatgttgattggcttgttgattgataatgttcaagtcttctgtattcttaccgatttcctattctatcagttatagacagagggtgttaaaatctcaattctgttttgcttgttgattgataatgtttaagtcttctgtattcttaccgattttctgttctatcaattatagagagaggtgttaaaatctcaattctgtttgtttttggtttgaaatttacttataaggtacataagcatttatgattgtcgtcatcttgatgaattggtctctgtcattttgaaatgacagaacttactttgtctcataatatagctactcgtgcttttcatttgattagtgtttggcatatatttttatattttaaaaaaacttatcacctgtgtctttatgtttaaagtggttttttttcccaggcatcatgtgtttgggatcttgcttttatccagtttgatagtgtttgccttttaattggagtttgtagactatttatgtttaatgtgattactgatttttttttgagatggagtctcgccctgtcgcccaggctgcagtgcagtggcacgatctcagctcactccaacctccgtttcccgggttcaagtcattctcttgcctcagcctcccaagtagctgggactgcaggcacctgacaccacacccggctaatttttgtatttttagtagagatggggtttcaccatattggccaggctggtctcaaactgctgactttgtgatccgcccacctcagcctcccaaagtgctgggattacaggtgtgagccactgcggctggatgtttactgatttttatagagtttaaacaaccatcttttctatttgtctgatgtggtgtttttttcgtttttgtttttttaagatggactgtcactctgtcgtctaggctggagtgcagtggtgcaatctcaactcactgtaacctttgcctcctgggttcaagcagttttcctgtctcagcctcccaagtagctgggattacaggtgcgtgccaccacacctggctatttttttttttttttttttggtttgagacagagtctcgcactgtcacctgggctggagtgcagtggcgcgatctcggctcactgcaatctccgcctcctgggttcaagcgatactcctgcctcagcctcccaagtagctggtattacaggcgcccatcaccacacccagctaatgttttgtatttttagtagagacagggtttcactatattggccaggctggtctcaaattcctgaccttgtgatctgcccgccttggcctcccaaagtgctgggattacaggcgtgagccaccgtgcctggcctaatttttgtatttttagtagagatgggcttttgccatgttggccaagcaggtctcgaattcctgacctcaagtgatccctgcccttggcctcccaaagtgctggcattacaggagtgagctacgccatgcctggcctggattgaggattttttagtggttcatttttaagtcctttcttggctcattagtactttgttattttagtggctgctttagtgtttattgagttcagcttgtgaaactcagtctttaatattataccacttcacctatattacaagaaccttatagcagtacacttcattttcccttcagactttgtgctatgtttgtcatacacttcacttttacatatgttgtaaactccacaatacattattatttttcatttaagtagtcaatttttttaaaacaatttttttttttttgagacggagtctcactcggttgcccaggctacagtgcagtggtgcaatcttggcttactgcagcctctgcctcctgggttcaagtgattcttatgcctcagcctcctgagtagctgggattacaggtgcgccccatcatgcctggctgatttttgtattattagtagagatggggttttgccacgttggcccagcaggtctcgaactcctgagctccagtgatccgcctgtcttggcctcccaaagtgctgggattacaggcatgagccaccatgcctggcctaaaaagattttaaaagtaagaaaaaatgtcttttactttatatgttttccatttctggtgttctttattgcctatgagcggttccagattctcatctgccagattttcttcagttttttctcgtcagttcagattttctttctgccagaggacttcctttaatgtgtttcttgtagtgtaggtctgctggtgatatctttaagctttggtgtgtttgaaaaagtacttcctcttgtttttagaaagatatattcctttgatacagaattctaggttgacaggtttttttcattgtgtactttaaagatgttgctccactgtctctagcttgcattatttctcctgtaaaatctgttgttattttaatctttgttcttcagcgagcaaatttatcttttttgccttttttggttaatttttaagattttctttttatcactgctttttcagcaatgtgtttattatatactttgttgtagtttgcgtcatatttcttgtgtttgaattctcttgagcttcatggatgaaatttacgtattcagctactatttcttgaaatatttttcttttgtacttccccaccgcatctggagtctgtaattacatgtatatttggctgcttgaagtagtcatacaactcactgatgcactgttatgttttttagtcatttgattctctttgttttgggtagtttctactgatcttcatttcactagtctttatctttcccatgttaaatctgttactcttatccagaattataccttttatccttaaaaattcagtttttttcttttttttgagacggagtctcattctgtcacccaggctgaagtgcagtggcatgatcttggctcgctgcaacctccgcttcccaggttcaagcgattatcctgcctcagcctcccaagtagctgtgattacaggcatgcatcaccatgtctggctagtttttgtatttttagtagagacagagcttcaccatgtttgccaggctggtctcaaacccctgacttcaggtgatccacctgcctcagcctcctagagtgctgggattacaggaatgagcgaccacacctggtttgtttcttaaaaaacatcttatatttctctgcttaacgtgctcaatgttgaacatgtgaaatataataacttttcataatctcttctgattctgtctctatatcatctttgggtctgtttttatgtattctatttttcttgtcattatgggtcagatttcccagttctttgcaatcctaataaattctgtttagatgaaagacattgtgaatttcactttgggttgtggatatttttgtattcatgttggtatttttgagatttgttctggagtgcagatgagttagctggaaactaattcttttgaggcttgctttttagctttgttaggtggggcgtatcctttctgtgtttatttttgtaagggtatacagatatacatgttttcttatttccctctttatttattcttatttaatctgtaacaatctttttccttatattcgtaacattcttagttagggagtaattacctcttccctaactgttgcattagcttcttaattggcactctggttcccagactttttctgtctctaatgcagtgtacagactactgtcagaataattctaaagcacaattctgatattgtcactgtattgcttttcagtgcctacagcagtaggattcacttaaaaaattattcccctaatagtaatataaaaaatttttttgagctcaaactctcattctctctcagtatacatatttgtttatacatgaggtcacatactgcttactaagttagcattttttatgtgttcattttgaaataactctgaacagtggtatccaatcttttggcttccctgggccacattagaagaagaattgtcttgggccacacataaaatacactaatgatagctgaatagctaaaaattaaacattgcaaaaaaaaaaaacaaacaaaaaaaactcactgtggctttttttttttttccctgtatttttctttttcccgagatgaagtcatgctctgttgctcaggctggagtgcagtagtgtgatctcggctcactgcaacctccgcctaccaggttcaagcagttctcctgcctcagcctcccgagtagctgggattaaaggggtaagcccccatgcctggcctttttttttttttttttgtggggtgagcgaccatgcctggctttttttttttttttttttttttttttttttggtagagatggggtttcatcatgttggccagtctggtctcgaactcttgaccttgtaattcacctgccttggcctcctaaggtgttgggattacaggtgtgagccaccactcctggccttttttttttttttttttgagatggagtctcactttgtcacccaggctggagtgcagtggcatgatctcggctcgctgcagccactgcctcccgggttcaagcagttctcctgcctcaccctcccgagtagctgggattacaggtgtgtgccaccactcccagctagttttttgtatttttagtagaggcaggtttcaccatattggccaggctggtgaactcctgacctcaagtgatgcacccacctgggcctcccaaatgctgctggaattgcaggcgtgagccaccatgccaagccaattgtgttttaagaaaagtttatgaattagtattgggcagcatcgaaagtttacaaagtttgcgttgggccgcattgaaagctgtcctgggctgtgtgcgacctgctggccgcaggttggacaaacttgctctgggacataagtttaaaagttataggccaagtgccttggctcacgcctgtaatgtctttgcatttcatcagtttttccactgttatctttctgttacagtacacggtcagaataccacattgcatttagttgtcatgtttccttagatgtgaaacaaatttaccaattgtagtagggtatttacgtatagatcggttcgtttgtagccttatagtatctagttaaaacactgttataaagttattgttatgtatccttttgggtgtggtttctttccttagaaaaatacatttaaaattcattcatgttgttaaatgaatcaataggttgtttctcttttaaaaattgagatgaaattcacataacaaaattaaccattttatttttttaattttatatatattttctgagatggagtctcactctgtagcccaggctggagtgcagtgacgcgatctcggctcactgcaacatctgcctcctgggttcaagcgattctcagccttaaccattttaaagtgcacagttaagtggcatttagtacattcacagtgttgggtaaccatctttatctggttccaaaacatttttttttctttgaaagaaaaccccgtatttattaagcatttttctctctgtccttttcccttcactcgcttctggcaaacaccagtctgctctgtttctgtggatttacctgttctggatattttatacaaatggaatcatagcgtatgtagccttttgtggctggttttgttttttttgtttgtttttttttttgttttttttttttgagacggagtcttgctctgtcgcccaggctggagtgcagtggcgggatctcggctcactgcaagctccacctgccgggttcacgccattctcctgcctcagcctcccaagtagctgggactacaggcgcccgccactacgcccggctcattttttgtatttttagtagagacggggtttcaccgttttagctgggatggtctcgatctcctgacctcgtgatccgcccgcctcggcctcccaaagtgctgggattacaggcgtgagccaccgcgcccggcctggttttgttttagtaagatacttttgctggattaagaataaggttgggccaggggtggtggctcatgcctataatcccagcactttgggaggccgagttggcccagcctggccaacacagtgaaaccccatctttactaaaaatacaaaaattagtcaggcatggtggcgggtaccttgtaatcccagctacttggaaggctgaggcaggaggattgcttgaacccgggaagcggagtttgcagttagccaagatcatgccactgcactctagcctgggcgacaagagcaagactcgtttcaaagaaaaaaaaaagaatacgtagttgacaggtttttttttctttcaatactttaaagatgatataccactgtcttgtcactcaccttgtttctaacaagaaatctgctatctttgttctgtattttgcatgctttttttttccttgctgcttttattattttctctttattactggttttgagcattagattatgatatgccagtatggtttttcttgtgtttattgtgcttgtggttcattgatgttcttggatatgtcggtttatagctttcttcaggtttcggattttttttttttttggccatttttttcaaattattttccatttaatttctcttttctttttagtcaggtactctttatccaaacattaggctgcttgaagttgccccatagcttactgatagtttttgttttaacctgtgttttatttgaaagattctatttctgtgcctttgaatttactttcttttgcagtgtgtaatctgaagttagtcacatttagcatttttaaaaatctcacatattttactctttttttttttttttttttttttttttttttaaagactgagtctcactctgttgcctgggctggggtgcagtggcacaatttcagctcactacaacctccgcctcctggtttcaagcgatcctcccacctcagcctcccgagtagctgggactacaggcacccgccactacgcctggctcatttttgtatttgtagtagagacggggtttcgccatgttggccaggctggtcttgaactcctgacctcaagtgatctgcttgcctcagcctcccaaattgatgggattacaggtgtgagccaccatgcccggccatattttacctttttttatcgttagaattttgatttggtttaaaaaaaaatctttcctgtctctacttaagtttttgaatatatgaaatgcagatataactcttataatgtccttgtgtactcattctaacatctgtgtcatttcagggttggttgcaattgactattctctttagtatacttttttttccttgcctcttgcctggtgatctttgattggatttcagacatagagagttttacctcgttgggtgctggggatatttgtatttctacatatgttctttaactttgttattggatgcagttaagtcacttgaaaaccgttgattcctttaggtcttgtttgtaagatttgttagctgggaacggtgtagtagttggtttatggctaattcttcctcacttctgagacaagattcttcccaaatcttgagggttgtcttgagatttccagtctaatagctacttgagtgggtaagggcagagtactgttcataattcttttgggtgttgttttcctctccttgctgcccatggtcttgggtagtttcatcacactatgggccactcagtactcagtgagtacctctctagatctcctcagccctctactgtgtggtattgtcccatgaattctagctgcctaagtcctgcactctgagctgagctcgctgtcttcaattttgagttctgcagcctccatagggcttctgcttctgcatggtgcccaggaaactctcttcaggcactaagtttggccatcataggactcatatctttgtttctcttcctttggggattactgtctctcattgcctgctgcgcagcatcttgaaagctatagtttcatgttttgttagttattttagtggtttaaggtgagagggtaaatctggtccctgttgtgcttgaaaagtttttttcaacttttcttttagaaataattttaggtttactaaaagctgcagaaataatacagagttctgaggtgtctttcacccacttcccccatgataacattttacataaccatagtatagttattaaaactaggaaattgacattggtataatagtgttaactaaacctcatgccttatttcatattttcacatgaactattttgagctggcatggttaatatacagttctatgaagttttatcacgtgtatagatttcgtgtaattatcactagtcaggttatagaagtattccatcattttaatgaaatgcctttgtactactcctgtgtagtcatcatgtcctccttccagcctccaccaccaatcaaccaaccaactttaatcctggcagctaccagttgtctgaattttatcactttcgctataattttatctttctcagaatgtcataatacagtagtccccgttatctgtggtgatatgttctaagacccccagtggatgcctgaaaccagctatagtactgaaccatatatgtgtgtgtgtgtgtgtgtgtgttttttccccccccccctttttttttttgagacggagtctcactctcgtcacccagactagggtgcagtggtgtgatcttggctcactgcaatctgcacctcacaggttcaagcgattcttctgcctcagcctcctgggtaactgggattacaggttcgtgttaccacgcaggctaattttttgtatttttagttgaggtggggtttcaccatgttggccaggctggtctcgaactcctgacctcaagtgatccacccaccttagcctcccaaagtgctgggattacaggcgtgagccactgcacctggcctactatacatatacgcctatgatgaaatttaatttataaattaggcacagtaagagattaacaataataaaaaattataacaatatactataataaaagttatgtgaatgttgtttctctctcaaaatactgtaatattttcaggctgcagttgaccatgcgtagctgaaagcaagggtaagtggtgactactgtaaatagaatcatataatatgttacctttgagattggcttttcttttttaactcggcaaaatgcctttgaaatcgatccaagtcctatgtattaacactgtttctttttattggtgagtagtattctattcttgggcacactacagtttacccattcttccattgagagcatttctcccccctaaattacaaacagagatggagtcttgctttgtggttggtctccaactcctaggctcaatctatcctcctgcctcagcctcccaaagtgctgggattagaggcatgtgccactgtgcctggccccactgaagaacatttgagttgttcccagtttggggctattacaaataaagctgctgtgaacatttgcatgcagattttagtgtgaaaatatttttatttctctaggatgaatacctacctatgagtagaattgctgggtcgtatgatacatgtatatttaactctgtaagaaacgactacactgttttccagagtggtggtagtttttcattcccactaacaatgtataagaaatccaattgttctgcttttttattagcactttagtattgtcagtatttttccttctgttcattgtaatagatgcatagtagtatctcatgccttaaatttgcatttccgtagtggctaatgatgttgaatatcttttcatctccttaggttccatttgaatattctctttggtgtagtttatgttcaagacttttctattttcaaattggattttttcttactgttgagtgttctagacacaagttatttgttggatacgtgatttgcaaatattttctcctaatcttttaatttgcctaagagtgtgcttcatagagcaaaaggtttgaattcttatgaagtctaatttatctatttttaaattttatagttttttttggtgtcatatctaagcactctttggctaacaaaattttctctttttttctaaaagttgtatgctttacatttaagtctgtgattgcatttgaattaatttttaaattaagcataaggttacatcaatgttcattttcctttttgggggaccaattattccaaaaccatttgcttaaaatgattattctttatttattgaattgctttctcacctctagcaaaagtcagttggccatattttgtgaaaagttctattcctacgcacactgttctggctcattgacctacgcatctgttcctctgtcaataccgtactgtcttgattactgtaatgtagctgtatagtaagtcctaaaatcaggtagtgttattcctccaccttcgtttttctttttcagagttgtttcagctattctggtttctttgtctttacatggaaattttatttatttattatttattttcttgagacagcctcagtgttttgcccgggctggggtgtggtggtatgatcatagttcactgctgcctggaattcctgggctcaagggatcctcctgcctcagccttccgggtagctgggactacagatgtacaccaccactcccagctaatttttactttttttgtagtgctggggtgtcaccctgttgcccatgttggtctcaaacacctgggctcaagtgatcttcctgcctcagcctcccaaagtgctgggattaaaggcatgagccaccacagtcagctgtgtatgaattttagaatcatattatctacaataaagttttggtggagtttcaatagtaaatgcattaaacccattggttagtttggggagaagtgacatcttggccatgttgtcttccagttcatggatatagtatgtttttttacatttatttaggttgtcttttttttttaaaggtacataataattgtacatatttatggggtgcatgtgatattttgatacaggtatgcagtgtataatgatcaaagcaaggtatttaggctatccatcacctcaaatatttatcatttctttatgttgggaatttttcaactcttcccttctaggtattttgaaatataaacaaattatagttaactacagtcaccatactgtgctgttgaaccctggaactaatttcttctatctaactgtatgtttgtacccattgaccaacccctctttatctccctgcccccttcccagctctggtaacgatcattttactctctgcctccacgagatcaactcttttagctcccacataggagtgacaacatgtgatatttatctttctgtgcctcttcctttacttaacaatgtatttaggtcatctttggtatttttatcagcatttcataggttttagcatgcatattttgtacagttttgttagatatatacctagttttttttggtaaactattataaatgaaattgtgcttttaatttttgtttctaattgctgattgctaatatatagacattattgatgttagtgtgttgatctgtattctgtgacctttataaactcacttattagttctacaagtttttctcctagaatctttgggattttctctgttagaccatcatatcatctgttaatagggccggtttaatatattcctttctgatatgtgtaccttttatttccttttcttgcttgattgactagctgggacttgtttgctgtgtcgaatatgagtgcttagtgtggacattcttgccttattcccgctttcagatagaaagcctttagtctttcaccactagtatgatgttagttatagacattttatagatggtctttatcaagttgaggacgttttcttctattcctagtttactgagagtttttatcatgaatgtatttgttgaattttgtcaaagtttctgcattgatataaataattatgctttcttttcacatcttattgttttagtttgcatttccttgatgatgaattccttttcatatgcttactgaccattttatcatcttcctgcgtgaattttctattagttttgcccatttaaaaaaagtttttattttgtagcaattttaagctttcataaagttctaagtacagtacaaagaactttattttttcctgacccattttagagccctgttgttccttactatttttatttattttttgagacagggtctgtcactctgttgtacagactggagtgcagtggtactatcatagctcactccagggcataaacgatcctcctgcctcagcctcctgagtagctgggacaagtgtgtgccaccatgcctggctaatttttttaattttaattttttgaacttctgggctcaagcgatcctcttgcctcagcctcccaaagtgttgggattataggcatgcaccaccgcacctggccctacccttaatactttagtattaatgttttagtatatttgccttaaagttaatgacattctccttgctacctgtccacaatacattcataaaattcagaaaattacactgagtcattattaccatctaatcttcagatttcattaaagtttagctaattgtccatgtaatgtcctttttgtccaaagtatctaggtcagaattatgtgttgcatggagttgtcatatgtctttggtctccttcattctagaacagttctttaatctttctttgattttcgtgaccttgactcctttgaagactacagaccagttattttgtggaatcttttttagtttgaattttctcataattggattcaggttttgcatctttgtcaggtatagcagagaagtgatgctaggttcttagtgtgtcctgtcaggtagctctttatttcagttttttcctattattgattatctctttgatcacttggttaaggtagcatctgccatccttcatcactataaagctcctttttacccccacccctttttttttgagatggggttttgctcctcttgcccaggcttggagtgcaatgtctcaaaaaaaaattaatagtaatatatacagtcatagttagaagccaagatctagtttctaaatgtttgctgctgttggagtgttggtgatcccagttcctttcagtgggaaggggctaaggaatatatgggtatatttacatacatacacatatgttcactcaatctatatttatatctgtctttatctaaatatgttgaaaactatgagcttaccccaataatacaagttctaatccagtcattctagttttttccctttccatatgtataagtcctttttccaacaataataaatctgggctgggcgcagtggcttacacctgtaatcccagcactttgggaggctgaggcgggtggattgcttgaacacaggcgttctagatcagcctgggcaacatgtcaaaaccccatctatatggggaaaaaaaaaaaagttagccaggtgtggtggcacatgcctgtagtcccagctactcaggaggctgaggtgggaggatcacttgagcccaggaggtcaaggctacagcgagccgagattgcaccactgcactccagccagagctactgagtgagaccctgtctcaaatctattccctaatatatttacctaattatttaatcacccactcttcactgttgcagccctttcttcatgcagatgtcctctttactttgcttggactccaacaccctgtgttgggttggctccactctcatcccatggatgagttcactcaagctctgaccagtcacatcagggtgttctcccatatacatgcccttctcaacccgcgtgggcttcaatactctgtcctttgtcattccctgtttgggcatttcactcatcttgatctccaactctcacgtcataccacactcagatacacacagataccttctgtgctccactcaggctctgactctctactcttgtctacctagcctcaggcctccacttttgtatggatgcctaccttgctgtgtaccatgtaatggaagggaagactagtttgggggaagagaagggcagctcttcccatttaaaaagattggtttgtctttttgttttaggtttatagaattgaaatatataggtgggcttggtggctcacgcatgtaatcccagcactttgggaggctgaggcaggtggatcactttggtttaggagtttgagattagcctggtcaacatggtgaaaccccatctctactaaaaatacagaaaaattagctgggtgtggtggagggtacctgtaattccagctactcagaaggctgaggcacaagaattgcttgaacctgggaggtggaggttgcagtgagctgagatcgtgccactgctctccaacctgggcaacagagctagactccgtctcggggggaaaaaaaagaattgaaatatatgtatacacacacatatacacactctggatacatactgtatcccgagtatgtgttttgcaaatattttctcccagtctgtggcctgccttttatttcttttcttttttttgagacagggtcttcctctgtcacccacgctagagtgcggtagcacagtcacaactcaccgcagcctcaacttcctgggctcaaagtgatcctcccacctcagtctcttgagtagctgggactacagacacgtgccaccactcctggcccattatgtctgttttttgtagagatgacgtctcactatgttgcctagggtggtctcaaactcctaggctcaagtgatcatcccacctcagcctcccaaagtgctggtgagccaccatgcctggcctggcctggcctgcctttgcatttttattaaagtgtcttttgattagaagtttttttgttttgaggaagtctgttttatccacattaaaacaatatgtttttaggaacttttgcctatctattaatagtgcacaaaaatattttttggctttatatttttggctcttaggtgtgcgatttatgtcaaattaatttttatttttgagagggagtctagctttgtcacccaggctggagtgcagtggcacaatcttggctcactgcaatctccacctcccaggttcaagcaattctcctacctcagcctcctgagtagctgggattataagcacttgccaccatgcctatttttctatttttagtagagatggggttttaccatgtttgccagcctggtcttgaactcctgacctcaggtgacctgcccgcttcagcctcccaaagttgctgggattacaggcttgagtcaccatgcctggcctcaaattaatttctatgtacggttcgaggtagtcattcaggtttgcgtttttacgtgtttatcttgtttcagctttatttgttgaaatgatgttcccctctttattgaatagctttggtgcctttgtcaaaaatcagttgagtccatacataaggatatgtttttgtactctgttctgttccattaatctatctatttttataccaatattttactctcctgattttagtaagtcatgagattggatagtgttagtagtgtgaatcctctgtgttcttccttcttaaaattgcttggactgcttttggttctttgcatttatttttctttcttttttagagacaaggtcttgctctgtcggcaggctgtagtgcagtgacgcagtcctagcttactgcatcctaaaacttccgggctcaagccatcctcctgcctcaagctcccaaggcgctgggattatgtgtgtgagccaccatgcccagccttctttgcattttcatataaattttagaatcaacttgtcaatttttatcaattaaaaaaattgggattttgattaggattatgttgactttgtagggagaattaacttctcaacagcattttttttcaatccatgaacatggtataatctccagttattatcatctttaatttttcttagtgttttatagtttccaatgaggtcttgcatgccttaacatttttttctcaagtatttttatttttttaattttttaaattaatttatttttttgagatggcgttttgctcttgttgcccaggctggagtgcagtggcggaatcttggctcactgcaacctttgcctcccagtttcaagcgattcacctgcctcagcctccctagtagctgggattacaggcgggcaccaccatacctggctaattttttgtatttttagtagagacagggtttcaccatgttggccaggctgttctcaaactcttgacctcgtgatctacctgccttggccttccaaagtgctgggattataggcgtgagccaccatgcccagcctcagctatttttattttcgatgctattatacatggaatttgttttaaaaatttgtttcccagttttttgccctagcaggtatatagctgatttttcaataacttgtaattttgacataatttcagacacgattgtatttgctttataattctagctacatgttatttttttcatgtactaaagtgcagacataatgccccctaacctctaaatagttattaacaacaagtacattctctttcataaccacattgcaattatcaatgtcagaaaattaatgttgatatggtactgcttgctgtctaatgtgcatactttgagctgggcttggtggtatacacctatagtcttagctactcaggaggctgaggtgggaggatcgcttgagcctaggagttgaaggctgcagtatgccatgatcaaccctgtgaatagccactgtactccagcctgggcaacaatagtgagatccctatctttaaaaaaaaaactgcatattttactgaaattttacctattcttttctaatgccaattataaagcaaaattctggttgaggatctcatccttgatcacatggtacatttgtttgtcaaatctcattttctttaatctgaaaaagttctcacaaacattgtcttttatgacttaattttttttaaagtacagaccatttattttgtattaatagtaagttctccaatatggatttgtcttgatgcttttcattattaaagtaatgtttttgacaggaatacctcagcatgtcctcctcagtacattttatcaggagacacgatacctgtttgtctgatttctgataacgataacttcaaacacttggttaaggtggtgtctgccttatttctctcctataaatagtaccttgtagagagatacagtagtcccctttatctgctggggatgtttcaagaccagtgggtgcctgaaattacagatagtcccaagccctatatatactgtgttttttcctatgcatatgtacttttgataaattttattttattattcctttatttagtttttagaaatacggtcttacaccgttgcccagcctggtcctgaatgaacttctggcctcaagtgatcctcctgcactggtctcccaaagtgttgggactacaggtgtgagccactgtgcccagccccccaagtttaatttctaaattaggcacagtaaaagaataacaacaataactaagaataaaatataacaattgcaacaatgtactataatcaaagttatgtggatgtgatccttctttctctctcaaaatactgtaattttttggactgctgttgaccacaggttatttaaactgtggaaggtgaaacttcgggtagagggcacttactgtactttgagactatatgaatagtctcatgtactttcattcactggttttagcatccactgatgaaggattcctacctaaaacagttagtacgctgaggctgggtgcagtagctcacacctgtaatcccaacactttgggagaccgaggtgggtggatcatttgatgtcaggagtttgagaccagccttgccaacatggtgaaaccctgtctctgctaaaaatacaaaaaaattagctggacatgatggcgcatgcctgtaatctcagctactgggggagggtgaggcaggagaatcgcttgaaccctggagatggaggttgcagtgagctgagatcgtgccactgcactccagcctgggcaacagaacaagactctgtctcaaaaaaaaaaaaaaataaaaaaaataaaaaaaaattagtactctgagagttgttgtcaagtggtgattttttttttttttaagttccaccatttatctgacatctattagttgtggtttttcagtaagggggagagctttaatttattcccccatttgtttattcgttgtgaatttatggattcttttttttttttttttttttttttttgagatggagtctcatgcgctctgtcacccaggctggaatgtagtggcacaatctcggctcactgcaacctctgtctcctgggttcaagtgattcatcttccttagcttcacgagtagctggggttacaggtgcctgccaccatgcccggctaatttttgtctttttagtagagacggtttcaccatgttggccaggcttgtctctccaactcctggcctcaagcgatccacccgcctcagcctcccaaagtgctgggattacaggcataagccactgtgcccggccatggattcctttttttttttttttttttttaaaatatgaagactcgctctgttgcccaggctggagtgcagtagtgcgatcttggctcactgcagcctctgccgcctgggttcaagtgattctcctgcctcagcctcacaagtagctgggattacaggtttgtgccaccacacccagcttttatatttttagtagagatggggtttcaccatgttggccaggctggtctcgaactcctgacctcaagttatccacccgctttggcctcccaaagtgctgagatcataggcatgagccattatgcccagccctacccatggattcttattttattattgagttataatcttactatcatttttaatgtacaaattgtcgctgatttggccagtggaattgcatgtactccagcttttgtgtcctttttatgtgttttcctcattcctgaacacttctttacttacctgctttctgacccagcaagatgttctgggcttagcttatattttcccagccccacttctagaatcatccattttcctggggagctctggtttcttttagcttagaatagtatgcatgtatacatctgtacctgtttctctctttgtctgtctataggtaaatatagtattcatactaataccttgaaattagtctcttactgggggtttcattctaactttacctttctatatgtgcatcttgctactccaacattgaacaacctggcttctattatgtactttgtatctacctacttgctcagttttagtataaacacttagtagttttataattgttaacccattccactgtggaagaacaaatctaactagaactcagtatttgtttatagttcatttaggtttttagcctaaggatatatagtcaaaatacttgaagaattacttgggttagatctgtccttgtgccccttcagtgtggttatgttattcactttaagtatatgtcagtaaaaattttaaatgtatcacaaccacttcctctttttagtgctgtgggaaaacaagcactgttgcattacccttaagaaaagaaataaatttttttttttttttttttggaaacaggtctcactctgtctcccaggctggagggcaatggtgggatcgtagctcacgtcagcctcccaagtagctgggactacaggcatatgcatcctggctggctaatttttttttttttttgcagacatgggggtctcactatgttgcctaggcttatcttgaactcctgggctcaagtgatcctcccgccttgccattccaaagtgttaggattataggcgtgagccactgtccccaggtcaagaaaacaaatggatacttttttttgttgggggatttgatactattaacaaaattatatttgcatctaccttttgaccgattgtttccatttgattattcaaggcagtagtatttgtagttgcagaatattaaaagccatctaaatgctggtggtacatgagggagtggttatactttgatacatcaacatcatggagtatcatgcagctgagaagaaaatgaggaagttttcatgaaacgatagagtaatttccagaatatattgttaagtggaaaattgaagagcaaaatactctctgaggcacgcagattttgttgttgttgttgtttaaggatgaaggataaataaaacagatgtgtatattatcatttgtacaaaaagaaacacaagaagaatacaccggaaacaatgaggttggttaggggactaacaggaatggaatggagagttggagggggatggaaatggaagggatggtggggagcagtgtcacttactctgagtataaccttttatatagttttgatttgtaatcatgttatatttcacataattcaatatgtagataaaataacaaagatgggaaataaaaaacaaaatgggttacaaacaaaagatgaaacccagtgctattaacagctgtacaattcttgatgtgttcaacgtatttcattcttctttctgaatgtttgttcctggagccatcttttttcctgctctccgcatggacagtttgtggtgtaaggtggccagccatcctggtttgcccacgattgaggggtttcccggggtgtaggactttcagtgctaaaactggaaactcccaggcaaactggggcctgttggctactcttttcacgtgcatgtggctgttttcctcggactttccttatatgtaccttgggaattctcttcactttctcctggtatgtcctgcctttcctagatctcacacaaatctcatttattgttactcctttagttgtgtgcgcattctctacacaatacatttatgtagagcagattgacgtagagttgcttctagagaacaggtgcctaggaggtaaattgaggccttacatgtctttattctgtgttccacactagattgttggttgggctcagaattccagaagatgttactcttactactacattcttcagagctgcttttgagaaacatgccattgtgatttctggatatcgtgtgttttttttgaccggaagattttaggatctgtttctctcctgtgttttgagatttcatgataatgctgtggaatgggtctttttcattcattatgctgagtgttttgccttattaaactcggaaactggagtcttctcatttggggaaaatttcttgtattatttctgtcttttggctttcttcctctggaccttctatttgttggatgtgggactctcttaatggagcttctttttcttttttttttttaatcagttctctaggagataatctgttgtttttggcctctcatttttaatttctagcagattgttcatgttctttaatgttgctttatttttttaaaaaaatattctggctgagctgtagtacgtgtctgtggtcccgactactggggaggccaaggtgggagaattgcttacgaccaggagtttgagtccagcctgggcaacatagcaacaccccatatcttattttaaaaaaagcactctatgtttgttttgggcctctttgagaacatttactatgaaattttatttatctttgtttcctttcagttcttcttttgtttattgtgattatctttcatataacaatgtgcttaaatagctggtggttcttgataggtcactcaacagtgagcaaactgatggatcctgtgtttgtgagcagtgtttattggctgtgatagagggtggggacctagatgcttttaggggatcctcctgttatccatttctgaaagtgttttctcctaggctggtcactttttccaggaggagaaatcctttcatctcttgccatctacatgacagtaggctgtggttggggtcatagtactactactatttggggagctttgggagccaaggtggggagggaagctagtggtgtcatgattttctggtgttttttgtttgtttgtttgtttgtttgtttgttttgttttgtttgagatggagtttatctcttgccgcccaggctggagtgcagtggtgccatctcaactcactgcaacctctacctcctgggttcaagcaattctccagcctcagcctccctagtagctgggattacaggtgcccgccatcacccctggctaatttttgtatttttagtatagatggggtttcgccatgttggccaggctggtctcgaactcctgacctcaggtgatcttcctgcctcagcctcccaaagtgctgggattacaggtgtgagccaccatgcccagcctgcgtcatgattttctattgttggtcttatttagagtgtggcatctcactccatgccccatcccttgagctgtgcctctagtcttctgttccagaacttccgtggttcagtttaatcagaatataaatctgttttcctctggagtgggagaagggtgtattgccttactgtttagggacaggaaggagacctgagggggtctgactgttttattcagagtttgaaacagttctcctgttctcagcccctgcctctcaactcttgtctgcagtggttcctggtgcctcccacttccctgcgtgctccgggcttttgaagcactggcttgctttttgtggcttttccctctgcagccataaacttcaactttccttctttgctgagtcagttacttcttaccttcctgctcaacctggtctttcagatttctgttgacatccctcatctactgcctttttccttccccttactctttgtctttatgcatgtacacttttactgttcccttatagtcattctagtgaaccctcaggaagatgcaaagaagtatatgttcattttgccatgtttatccacaacccccaaataccattaaacaaaagaaaagaaaaaatatttaaaaaagaaaacaaaaacaaaaacaaaacaaacccttaataaatggagagcagctatgccatgttgttgattaagaagattctatatcgtaaagatgtcagttcttcccaatttgatttgtagattcaatgcagtacactacaaattttgaaaattgagatataatagttatatgtattttgggggtacaggtgatattttgatacctgtatgcaatacatagacatttttctttgtgttgggaacattaaaattcttcttttctagttattttgaaatatatagtaaattattgtttactataattttcctattctactattgaatattagaacttactccttctatttaactgtaattttataccccttaaccaacttctattttgccatgtttaaatatggaagctcaagcgtttgtacagagaaagtggaaaatgcccttggcttttatgccaaaccccaatccctctgtccccacctgccaccctggcctgttgcccctgttcttcccagtagctacaaccactatcattaatttaacgtgcatcctcctattcatatggaggtatgtggtatgtttgtttatataagtgtattttattttctttaatgtttaatagtgtaccatatcaatatagctacattttatttatccagtcccctgctatgaatatgtgcgtttttcactgttttctaatccctgttataaacactgcagcaacacttatccttaatctccatgtacaaacgtgtgagaatttctctaagggactattcccttaccttttcatattgtatgcttgggtaaaatggaagtgacttggaggctctttctgtgggggttagtgaaaagatttcattacattttctttgcattttgtaattatgatgagaaaaatataaaacttataaatcttttttaaaagttttgagaaacatgctttgttacgatcatgacatcaagttttatgcttaaaaagtctgtaattccttgtgtttaatgatgaactcttcaaattcctgatacagatctatagtcccttattaacaattctgaaatccaaaatattatgagaactgaatttttttccccttgactgatttagtagtaaaacctgacctgtgtaaactcattttgtgtcaaaactctgatgtagattgacaggtctaggttagcttatttgtttcacttggtctttgtctacattttatttttttaaaaattaatgtgtttgattatgggttgctggtggtgctgatacacaatatatgcatatattaacattctaaaattcaagaaattctaaataaaaacacatctagacccaaagatttcaggtaagggattgtggacctgtggtcaccattagctagaaagtttcagctgtgagtggcaacttacaagaatttctttctggttgatagaaactcctttcttattattagtaagaactcagacaatttctttacgttatattccaagagtgtgttcattttttaaataacagctcttccttttctttcgttgacatctataatattgaaattgcttttgataatgcaaatggatttcacattcaagagaacctttttatgttaagtattttgtttaaatggagaagccttttctcaagcatgtatggagattgctttccttgttttaattcttctttaggattttcatgagaaaattaaaacatcattaatggaccattttagccacagttttccaaagttgcattttgactttggatctttaaactttctgtatactttaataggtatgtgtaggtttaaaaaaaattttttttttttgatcagaatcttttgttttaggccaggtgtggtggctcacacctgtagtcctagcacttgaggctgaggagggtggattgcttgcgctcaggagttcaagagcagcctgggcaatatggcaagaaccccatctctacaaaaaataaaaaagttggccgggcgcggtgactcatgtcagtaatcccagcactttgggaggctgaggcaggcgaatcacgaggtcaggagttcgagactagcctggccaacatggggaaaccccgtctctactaaaaatacaaaaaattagctgggcatagtggcaggcgcctgtaaccccagctacttgggaggctgaggcaggagaattgcttgaacccgggaggcagagattgcagtgagctgagatggagccactgtactccagcccagatgacagagcaagactctgtatcaaaaaaataataataataaataaatacaataaataaataaataaattagcctggagtggtggtgcatgcctctagttccagctacttgagaggctgaggtgggaagatcacttaagcctgggaggtcaaggctgcaaatgagctgtgatagcaccgtggcactttagcctgggcccgcacagtgagaccctgtctcaaaaaacaaaaacaaaaaatacgttttagaactatcagttaaattttgtaagccattgtttacctactttaattgggatttaattcatagaccatacagttcaccaatttaaagtatacaattcagtggcttctagtatattcatgaagttatgcaaccatcaccatggtctgattgcataatatttccatcaccccaaaaggaaaccccagtaggtcattcctattctcacctcctcctagtccctagcatcaccagtctactcatttaattactaaaactttctaaaaagcaactcctctcatcttgttcttcaagagtatcttggctctttgtgaccctgtgcttttccatgtaaaattctgtaaaagatcgtgttgagagctttattggaactgcattgaatcgacaaatcaaaatgggaagaattgacatctttttttttttttttttttttttttttttttttttttttttgagacggagtcttgctctgtcacccaggctggaatgcagtggcacaatcttggcctactgtaatctccgcctcccagcttcaagcgattctcctgccttagccttgcgagtagctaggattacaggtgcacgccaccatgtctggctaattattgtatttttggtagagatggggtttcatcatgttggtcaggctggtcttgaactcctgacgtcgtgatctgcccgccttagcctctcaaagtgctgggattacaggcttgagccaccatgcccagccaaattgacatctttatgatataaaatcttcttaatcaagaacatggtatagctctccatttatttagggtttgtttgtttttgtttttttgagacagggtcttgttctgtctctcaggctagagtgcagtggtgcgatcatagctcgctgcaacctgaaactcctgggctcaagcaatgctcccacctcagcctcccgagtagctgagactacaggtgcgcgtcaccatgtgcagctaatttttgaatttttttgtagagcgggggtctccttacgttgctcatgttggtcttgaactcttgggctcaagtgatcctccttcctcagcttcccaaagtgctgggattacaagtgtagccaacatgcctggccttaccaaggttttaagcctttcttgataaagttttatgttttcttcataaaatgatgatatttcttttgtggaatttatccctgggtaacttacgttcgtttttgttataaattatatttttgttataaattatatttttgttttcttttttcttcaaccctggcaaatggatatattttctttttttttttttttgagacagagtttcgctcttgttgcccaggctggagtgcagtggcaccatgtcagctcactgcaacctccgtctcccattcaggcaattctcctgcctcagcctcctgagtggccgggattacaggcgtgcgctaccacgccgggctaatttttgtatttttactagagtcagggtttcaccatgttggccaggttggtcttgaactcctgacctcagatgatccacccacctcggcctcccgaaatgctggcattacaggcatgagcccccacacccggctgatggataaattttctaattgatgatgttaattggtgatgttagtatcacttgatttttccttttttttttttttaatgtgatctcaaatgtcacaatgtggccaaaatcttttactaggtctgagtctcttggatctttaatgtaaataattatgctatctggaaattatgacatgcttttctaatcccttcttgtttctattatgcattgaaaggaattctagtatactgttgaatggttggtgttttcttagtttttcacagccttcaagtcagccttctcctaagagatagtacttattttttgctcaggaaagatataaggaaaggcataactgatattttgcttttttttttacttcagaatctaatcttgggcagtttaaactttatcaatttaaatgttagctctcctttgctcagatttgccacattcgtagtgtcttgtattttttaaaacatctgacctgtgggagaacattttattttggtttacttattacagatggtttattttttttcaacattagcttcttttctagttaccttgccaaactagtatacgttatgcattttagaaacacttatttgtattaatagatgaacgtgagtaaaaagtatacagcaagtcttctttgtactgttttactcttgcaaaagtagaatgaaaagcttttgcagctttcctgtaaaattgaatttctttccatataaaaatgttcaaaatgtatttgtaaaaggaatacgtactcatcatcagtattaaaaaggttcagaataaagaatccctacaactacagtttttaaaagacaactcaaaaaaaaaatgggtgaaagacttgaacagatacttaaagaggaagatatgaatatggccaataagcacattaagaagtgctcatgcagccataaaaaagaatgagttcatgccctttgcagggacgtggatgaagctggaaaccatcatcctcagcaaactaacacaggaacagaaaaccaaacaccccatgttctcactcataaatgggagtgaacagtgagaacccatggacacagggagggaaacatcacacaccggggcctgttggggggtggggggaaaggggagggagagcattaggaaaaatacctaatgcatgcggggcttaaaacctagatgatgggttaataggtgcagcaaaccaccatggcacatgtatgcttatgtaacaaacctgcacattctgcacatgtatcccagaacttaaagtaaaatttaaaaaaaaaaaaacttcaaaaaaaaaaaagtgctcaacatctttagacattaggcaaattaaaatgaaaatcattgaaatctagcactctgaattaaaattaaaaccacaatgaggtaccattatactcccactagaatggctaaaataaaactgccagcttcaaataatggtgaggatttggatcaactggaactctcctcaagtgctgttgggagtataattttttttttaataaagttagctttcatccatcttatgactcggcatttctactcctagatagttattcaggagaaatgaaaacgtctccaaaaatttacaagaatgttcataatagctttattcataatagctagaacctggaaataacccaaatgtccatcaagagagaatatacaaatggttgtatatgagaatattagtctgtaataacaaataatgaactactgatgcatgcaacaatgtagatgaatagcataaacaggctgagtgaaagaagccagatacaaaagaatatatatgtatgagtccatttacatgaagaccaagaacaggcaaaagtacgttatggagatagaagtcagaacaatgattgccttcgtggggtgagaggggtggtttcttttcttttttttttttttttttttgagacggagtctggctctgtcacccaggctggagtgcagtggcgtgatctcggctcactgcaagctccgcctcccgggttcatgccattctcctgcctcagcctcccgagtagctgggactacaggcgaccgccaccactcctggctaatttttttttttttttttgtatttttagtagagacggggtttcaccgtgttagccaggatggtctcgatctcctgacctcgtgatccgcctgccttggccttccaaagtgctgggattacaggtgtgagccaccgcgcccggccgagaggggtggtttcaaatgggggttgattaggaaggggcacaaggaaacttttgggggtgttggaaatgttctatatcttgatatgcatttgttagaactcattaaatggtacacctaagatctgtgcatatcactgtgtttaaattaaactttaatttaaaaaaataggggaaggataggaggaggtatacattgatccaagggcattctcctacgtaagcacaatacagttatcacactcagaaaatttaacattaatgcagcattaccatctagtatgcagttcacattcaaatatcccagtgtcttgaaatttgctgagagtagatcttaattgtcttcacactccccatctcacactctccctctcatggtaactgtgtggtgaaggattggttaatttttttttttttttttttttttaaagacagagtcttgcactgtctcccaggctggagtgcaatggcatgatcttggctcactgcaacctttgccttccaggttcaagtgattcttgtgcctcagcctcccgagtagctgggattacaagcgtgcaccaccatgcccggctaatttttgtatttttagtagagacggggtttcaccatgttggccaggctggtctcgaactcctgaccttgtgatccacccgccttggcctcccaaagtgctgggattgcaggcatgagccaccgtgcccggcctatagaattttttatatgtaggatttagtgaaagatcacccattattaatttttttaaaagcttcatgatgaaaattattcttgtaaaatgttaaaatcttgaatcctagggcatgttttctggcacctgttattttcagtaacccatttcgtttttgtcagacatatagggttaatgtatgaaaagtcaattatgtcaaacttatagagtttatatggaaagattaatgatcttttacaaatgcagaattggctggatgtggctaattgtagaattggcctgtaacctagcacttagggaggctgaggtgggaggatcgcttgagtccaggagtttgatttttttttttaattttttattttttgagacagtctcactctgtcgccctggctgaagtgcaatggcatgatctcagctcactgcaacctccacctcccaggttcaagcgattcttgtgcctcagcttcccaagtagctgggattacaggtgtgtgccaccatgcctagctaattttttgtgtgtgtgtgtatatttagtagggggggtttcatcatgttggcccaggctggtctcgaactcccagcttcaggtggtccccccatctcggcctcccaaagtgctggattacaggtgtgggccacaatacccagcattttttatttatttatttatttatgtatttgagatggagtttcaccctgttgcccaggctggagtgcaatggcatgatcttggctcactgcagcctgcatgtcccgggttcaagcgatcctcctgccacaacctcccgagtagctgggaatacaggcatgtacaccacacccaactaatttttgtatttaagtagagtcagggtttcattatgttggtcaggctggtctcgaactctggacctcaagtgatctgcctggcttggcctcccaaaatgctggaattacaggcttgagccactgcacctggccaagcccaggactttgagaccagcctgggcaacagaccaagaccctgtctgtacaataaaaattatgcagtattagaatagcaaatcttactcttaaaagttttgttttccttgtctttttactgaaaatgcatggctttagaaacttctgggtagtttgaattgcagacaaccaggccctattcctgtttgtttaactaatgagatttgtaaacagtacttggtttccccagactctaggacctagaggaaggaaattttgatttagctcttggtaaagcatttaacacctaatttttctttttcattgttattttcttgatcacagaaaacaatacatgttaatagtagaaaatacccacaattgaaaagaatataaagcacttactaaaactctaccacctaggctaggtacggtggctcacacctgtaatcccagtactttgggaggctgaggtgggtggatcacctgaggtcaggatttcaagaccatcctggccaacatggtgaaaccccatatctactaaaactacaaaaattagctgggcgtggtggcagccacctgtaatcccagctgctcgggaggctgaggcaggaaaatcgcttgaacccaggaggaggaggttgcagtgagccgagatcatgccgctgcactccatcctgggtgacagagcgagactcttgtctcaaaaaacaaacaaaaaaactgccacctagagatggtggtggccaacagcttagtaagaatttctcttgcatttttctatgcaaacacattcaaattttcattttttaaaaaagatgatagaatcatactgtatgaatttaattgcctaattaagcttgtgtatcatcgtttctcttgtcattaaatgctgtacagctttcttttaaatggctatctgtggtagtgttccttgaaggaaataccttaaaattttttgtttttaaacttttataattgtgggaatgtaatacagtgaatgcataggacacaaatgttcagcttaaggaattattataaagtgaacaccctgtaactgccacttagatcacgacatcaaatatggccagcagccaggcgcacctcccctaccccccactgccccttcccagtcacagccccattcttccagctgaaggtaacttctgtcttgactttatgaaagttattttcttgctttcctttagattacctacccgtctttgcattcctaatgctgtagtttagttgagcttattttgaacttttcacaaacggaatcatcaactatgcattattttgtatctggctttcattcactattttgtttttaatattcatctatgtcgttagtagctatagttcattcattttttgttgctgtataatcatccatttattgaatgtactacaatttgattctgcctttggcagccactttgattgtttataatccagatttcaaatgctgcatcatgaacatgtgggttgtgatttgtgtagatgtgcatgtacttctctaaggaatccaagcctaggagggacgttgctgggtcagaggatgtttgtatcttcaactgtaccagataaggccaaattgtattctcaaatgcttggatctgttttcagtgtacttgttctactcctaattaacactacttgatattgtcaaactttaattgtagccattctgatggatgtggtagtatctcattgcggttttaatttgcattattttgcattttccttattgttagtgagattaaatacccttttatatgttttggctacttcagtatcctcttgtgcagtgcctaattcacatcttttatttttcttctgagttgccttttgcccattgatttatatttgttccccctctctccccgcccccaagaaggagtctggctctgtcacccaggctggagtacagtggcacaatcttggctcactaacctctgcctccttcgttcaagtgattctcctgcctcagcctcccaagtagctgggactgcaggtgtgcgccaccacgcccagctaatttttgtatttttagtagagacagggtttcaccatgttgaccaggcttgtcttgaacccctgacctcaagtgatccatccgccttggcctcccaaagtactgggattacaggtgcaagccaccatgcccggcctgatttataaatgtagtctaaatacaagttctttattggttatgtaagttgcagatatctttttcagctctgtaggtaataatgttttttgatgaataggaggtcttaattttaatgtagtttaattgatttgttttctcctttgtaagaatcaatatttttcatgtcctgtgtaaatctcgtattgggataaaagatacatatatattttttaggttttggctaatagttttccgttggcagcatgtgaacctttttatgccatttttactttcatcaagggtgtatgtatgattttctcatactcttgtcagaactggagatttggggtaactttgccagtgtaatagactttcttaattcattaaggagtattttatcttagtttgcccatgagagaagagagattaaatttgttttattataccaagaacatggcagtcaataagcataactaaaaatattatttagcttttgattctgaagaccatgtatggccagtaaggaaaagaggtaaagatgtagaaaactgttttcttttttttctttcttttttttttttttttttttttttgagatggagtcttgctctgtcgccaggctggagtgcagtggcgtaatctcagctcactgcatcctccacctcctgggttcaagtgattcccctgccttagcctcccgagtagctggtactacaggcgcgtgccaccacacctggctaattttttgtattttagtagaaacagggtttcaccgtgttggccaggatggtctcaatctcctgacctcgtgatccacctgcctcagcctcccaaagtgctgggattacaggtgtgagtgagccactgcacctggcctcttttttattaatttaagatacatgattttggctaaaactaatgaaaataaattgatgaaacttcaatgtagtggatcaagagactcatgaaattgatgagttagattgttgtgggcacctgttttaaatttatggtgcctttttagcagaatcatgactttatcaactctttttcacatacttttattcaaagaagacattctcctcctctgccccaacttatcttcttcttgtctccaactgccagtattctcatccacactctttgtagttttgaggtgtgagataactcccaagttcttcttgggaatgggtagagtttaattctgagtctacatgtcgtgagtctattggaagaagcttttcttaggaggtgaaatttgggatggagttctcctctacactctagccctgtagccacaatctttggtttagatctttggcattttttgttggacatctttcatagtgtctacctcttcttcctgcctctaggcttcccgcggttgccagatgaaattccgaaaactcaaatcattcctgtagttaatattcttcagtgactccggaacaatcaaattcttgatccctccacatgggtcttaccatctgccctcgtgccctctctagcttcctgcatattgagttccccacagccctagtttccctgagtttggaatattctttcacatttgctcatcccactatctagaaacttcctacaatctctctactgccaacctgtctgtctagttgctaatttattttaaaacccagcttaagcaacacatccttttggatgtgttacttccctgatcgttattcacctccatgccgtctttcgctcaactcattgaagttaggtgcccctcttctgggctgccacggctctccatgttcacctatgtactgtactttgtattgtaatcagtttaattgacccccctacttatttgagctccttgagagcagggccttgattcctgctccttagcactccaccctccccagaactaacatggtatagcttataggaggcaccctataaatgtttaatgaatgtttgaatgcaaaagtgtatctaactttcttaatgatatatttatgaaaagaacttgctgagaaaaaggtcagttagaaagggttaggaacttgtcagtattctaaatccctctttttcaaaagcatacacatttaggaatgactgccttgctttaagaatttgtagggttttgttcacctgagttgtaccttgctgtcacagaaggatgccctgcagtggtctcgccatccagctacagtggagggagaggagccagaggacacggctgatgtggagagctgtgggtctaatgaagccagcactgtgagtggtgaaaacgatggtaaggaccctttaatggatgggtgagggagccacagcaggcactagggactaacctttattttcctctcttccagtatctcttgatgaaacatcttcgaacgcatcctgttctacagaatctcagagtcgacctctttccaatcccagggacagctacagagcttcctcacaggtaaggaagaggtagagcctagcctgggaggatgaatgatgacaggtataaggcaagatccctccttctcctgtagtgagctgtgaacatgttcagagagtgaagaatagaagtctggtctccagctgttagtagcatttaacagggggccgcaggaaaagtgaacagtaggtttgagcagagtaagttttttctctttctttaccttggctgagtgattttgttcattctttttttttttttttttttttttttttgagatggagtcgcgcctgtcgctcaggctggagtgcagtggcatgatctccgcttactgcaacctctgcctctggggttcaagcaattctcctgcctcagcctcccgagtagctgggattacaggcacgtaccaccgtgcctggctaatatttgtatttttagtagagatagggttttgccatgttggccaggctagtctcgaattcctgacctcaagtggtctgtccacctcagcctcccaaagtgctgggattacaggtgtgagtcaccatgcctagcctgattctgttcattcttgtaatatacacgtgaacattcagggagaagtgtggttagtgcagagtagagagaacaggagattgggagtgagcagtttgaatgataaccctgcacttactagccttgagacttggggaaaattccttacctgtaaaatggggataacagtacatttttgtagcttggaatgatgcttggcacagtgaccagcacgtagctcagtaacattaaccagtgctcttgtcagcattatttgacagatctggttgaagacgaacttcattttacaagagcgtgagtagagatagtgtcgccagggaatgcttttgtggctctgcagttgacttgggctctcttttgttctctcttggaacgcaggcgaacaaacaaaagaaaaagactggggtgatgctgcctcgagttgtcctgactcctctgaaggtaaacggggcccacgtggaatctgcatcaggtatgtgtaaactcatggttgtgatgctttttcctcaggtcctggggacctggcctccctctgtcagcagtttctgacctaatagtgcgatactaggagagctgtcgggccacaggcaagagccctgccaatggatgaggcctgccataggttctagtgctgggctctgctgtgtgccttcctctttgtctcccagggcagtcgtgaggatccaacggaggatttgattatgccagtgctttgtaaaaggtgtagtgctatacaaataaagatggcagtttggcacctgtaaggtgatattttaaagccagaccatgaagtggtggtttctctcagcctaaggctgggagatggaagcatcccagtattgctggcagcatctcagggagagctgggagaaatgagcttgtctgagagccatgggcgcggcttggtgatacttttgaccagtggaatgctgtgccttcagggttctcgggctgccacgccgatggcgagagcggcagcccgtccagcagcagcagcggctctctggccctgggcagcgctgctattcgtggccaggccgaggtcacccaggaccctgccccgctcctgagaggcttccggaagccagccacaggtgagtggcgtggcacttatttctctgcctgtaaagggggcccctgcaggcctagtgagaagatgatgtcttctattccaattcctttaccagtttatttttacttcttgggtggccctctattttttgtttatttttactttgtaatttgcttatttcatttgtagctctctgctaaactgtgagaactcctttcaggcagagatgatgccatactgtttctcgtatgtccctgtaggcctagtctatgcctgccttgtactgcatagtaagtgtttgagtgagtgaaaactgcttctgagcttctcagtgaagaattccaacaccccttttctctcttcggtagcatgttgccacatttgttcccaacatctgtagtctgtatcagacgctcccttttttacaacctagtcagtatgttgagtggaagcatgtgttgaattttggggatgcaaacaaattcagtagtgctattatctatacctcccacccctcaccccaccccacccccattagggttatttgcaatattagtatgctctttgctatttcaggatttaattcttaatgacccacatgctggttttttttgtagatgaaaccattaagaagacaagcttttgcttctgagaattagagtaaacctttgcccatgtgagaactaggtttgctgtcttgctgcttttccagctcatcagcagtgctcaatctaaggtctcacaggtctctagtcctagtgagtttttcagataaaagtaacatttgctgaggcttctgtgagaggtattagcatctcagttggctttgaacagtccttagtacatttctgcatggagatcatccctctccagcccattcacagaaggcttctgcagatttttctatagtatactaactagatttacttttagataattctcatgatttctccagttgagctttgtggagcctgttctccagctttggagggaagctcagaacctgccccttgcctgattttctgtgggaagtgtccttttcaggctgtgacacagcacggtacagagttttgtctgaggagatgcaaccccaagtgttctcctgggtttgatggcaatgacagtaacctggaaagaatatacaggttaggatggactggacaattgagcagattgtgtgcagataactcctgggtagcttgggtgctgtcaccaaagttttcccatcagttggcatttgttttttcttttaaaaagctgaaatctataccttgcttcaaaaatcataggtcaaatgaagcgcaacagaggggaagaaatagattttgagacacctgggtccattcttgtcaacaccaacctccgtgccctgatcaactctcggaccttccatgccttaccatcacacttccagcagcagctcctcttcctcctgcctgaagtagacagacaggtgcacatgggcagcctcccctttgcctctctctgggtgggcttctgttctcttttaagtttatttattaggatttttttcccccttgatccttctaggtggggacggatggcctgttgcgtctcagcagcagtgcactaaataacgagttttttacccatgcggctcagagctggcgggagcgcctggctgatggtatgtagacttggtcatctcggacggcttgcgacgcacctgtcgtgtggtgttgcatgtctcctggtatttaaaacccaagctcgctcttctcaaagggttatttagtataagacaggctttcctcattactaataaatgtggtgggtattaatatgccacacagctctgaagaaataacagggtgtttaggtttagactttcactatattgtatgtatgtactcattcatcatctcctttttatcattaaaactataaacacctattccagtaatcatggcatggtctggaagggtggaggaaagtacactgtggagttgagaagctccaccatgctctgtctttttaggcattgtcacttggagtgattgttagcttctattaatttaattttgtggggaaagtgttgagagggctctaagaacacccctaggtttgatgatttgctagcaggactcagcatatagttatatgtacagggctgcggtttattacagcagaagaatacaaagtaaaatcagcagatggagaggcacatggggtggggtccaggggaaaccatgtgttggcttccaaggtcctctctcagtggtgtcacacaggacacatttaattcccccagtaacaagttatgataacatgtatgaaatgtctactagggaaacctgttaaagactcggtgcccagggtttttatcaagggctgatcatgtaggaagccactgcttggcacatacccagcttccagattcccaaaaggaaggcaggtgttcagcataagccgtattgtttgcataaacaatttaggcacagtgaacaactcatatcagttagggtggttgggaaccctcctgaaatctaagttcccagatgtcagccaagggctgttcttttaagtaggcctttctaagagtaaacaatcaggcctacctactatgttaactttttatctacacaggaaatatgaatggttcttttgtttgttgttttgctttttcgatcaaggagttgcttggtctcactttaaggaagagtgaatttcccttatagtagatgtgttagctctgtccctataagagcatgatgtgagagagcctttagaagagacgtgttgttttaaaactgggagattcagctgtccataagacagacattaatatcccgaatgcacttactagaagaggtttatttctccctaggtgaatttactcatgagatgcaagtcaggatacgacaggaaatggagaaggaaaagaaggtggaacaatggaaagaaaagttctttgaagactactatggacagaagtaaggcagttggagctatgagtcctggtctggggttttgaggggatagaggtagatggtctcaaaatagcatatacttatgtgttggacaagaatgtggagattgcagtgacacttgggtcatttatcttaatgccattcatagtgaagctaacagaagtttttccatggttagattgtgcaccacacagatttattttgttctgagatatctgtgtttctgggtccatattattcatagaaataagagacatgtccactctggcctgaaactgatggctgtgattttgatttgcaggctgggtttgaccaaagaagagtcattgcagcagaacgtgggccaggaggaggctgaaatcaaaagtggcttgtgtgtcccaggagaatcagtgcgtatacagcgtggtccagccacccgacagcgagatgggcattttaagaaacgctctcggccagatctccgaaccagagccagaaggaatctgtacaaaaaacaggagtcagaacaagcaggggttgctaaggatgcaaaatctgtggcctcagatgttcccctctacaaggatggggaggctaagactgacccagcagggctgagcagtccccatctgccaggcacatcctctgcagcacccgacctggagggtcccgaattcccagttgagtctgtggcttctcggatccaggctgagccagacaacttggcacgtgcctctgcatctccagacagaattcctagcctgcctcaggaaactgtggatcaggaacccaaggatcagaagaggaaatcctttgagcaggcggcctctgcatcctttcccgaaaagaagccccggcttgaagatcgtcagtcctttcgtaacacaattgaaagtgttcacaccgaaaagccacagcccactaaagaggagcccaaagtcccgcccatccgggtaggagactgtttgattcctggctgccctggagccaggttttctttgagggtcatgagattatagagcccttaactctggggccctgaagttaattatgtgggaatgtagagctttttatgagaggtttgcttgagacagccttcaagtttagtgagataggttcttttcttcctcacttttttgttcactctgttgaagttatcttgagaggtcaaaatcctttggggttttaaaatctttttaagatagcattagattctttgctatagtgactcacacagtcccaccagaaattaaatttagaagtgtggcatataacagcccttgagcagaatcttctctgaatggtgtgttatggcgccattttactatgatgatttcattgttttaaggaaattatttgattctgtatgccatgacccttaagctactagaatcctagttttgctttacagtccctaggtcagatcacccagtcagttaaaactattttctaattctttttttgcagattcaactttcacgtatcaaaccaccctgggtggttaaaggtcagcccacttaccagatatgcccccggatcatccccaccacggagtcctcctgccggggttggactggcgccaggaccctcgcagacattaaagcccgtgctctgcaggtccgaggggcgagaggtcaccactgccatagagaggcggccaccactgccatcggaggggggggtggcccgggtggaggtggcggcggggccaccgatgagggaggtggcagaggcagcagcagtggtgatggtggtgaggcctgtggccaccctgagcccaggggaggcccgagcacccctggaaagtgtacgtcagatctacagcgaacacaactactgccgccttatcctctaaatggggagcatacccaggccggaactgccatgtccagagctaggagagaggacctgccttctctgagaaaggaggaaagctgcctactacagagggctacagttggactcacagatgggctaggagatgcctcccaactccccgttgctcccactggggaccagccatgccaggccttgcccctactgtcctcccaaacctcagtagctgagagattagtggagcagcctcagttgcatccggatgttagaactgaatgtgagtctggcaccacttcctgggaaagtgatgatgaggagcaaggacccaccgttcctgcagacaatggtcccattccgtctctagtgggagatgatacattagagaaaggaactggccaagctcttgacagtcatcccactatgaaggatcctgtaaatgtgacccccagttccacacctgaatcctcaccgactgattgcctgcagaacagagcatttgatgacgaattagggcttggtggctcatgccctcctatgagggaaagtgatactagacaagaaaacttgaaaaccaaggctctcgtttctaacagttctttgcattggatacccatcccatcgaatgatgaggtagtgaaacagcccaaaccagaatccagagaacacataccatctgttgagccccaggttggagaggagtgggagaaagctgctcccacccctcctgcattgcctggggatttgacagctgaggagggtctagatcctcttgacagccttacttcactctggactgtgccatctcgaggaggcagtgacagcaatggcagttactgtcaacaggtggacattgaaaagctgaaaatcaacggagactctgaagcactgagtcctcacggtgagtccacggatacagcctctgactttgaaggtcacctcacggaggacagcagtgaggctgacactagagaagctgcagtgacaaagggatcttcggtggacaaggatgagaaacccaattggaaccaatctgccccactgtccaaggtgaatggtgacatgcgtctggttacaaggacagatgggatggttgctcctcagagctgggtgtctcgagtatgtgcggtccgccaaaagatcccagattccctactgctggccagtactgagtaccagccaagagccgtgtgcctgtccatgcctgggtcctcagtggaggccactaacccacttgtgatgcagttgctgcagggtagcttgcccctagagaaggttcttccaccagcccacgatgacagcatgtcagaatccccacaagtaccacttacaaaagaccagagccatggctcgctacgcatgggatctttacatggtcttggaaaaaacagtggcatggttgatggaagcagccccagttctttaagggctttgaaggagcctcttctgccagatagctgtgaaacaggcactggtcttgccaggattgaggccacccaggctcctggagcaccccaaaagaattgcaaggcagtcccaagttttgactccctccatccagtgacaaatcccattacatcctctaggaaactggaagaaatggattccaaagagcagttctcttcctttagttgtgaagatcagaaggaagtccgtgctatgtcacaggacagtaattcaaatgctgctccaggaaagagcccaggagatcttactacctcgagaacacctcgtttctcatctccaaatgtgatctcctttggtccagagcagacaggtcgggccctgggtgatcagagcaatgttacaggccaagggaagaagctttttggctctgggaatgtggctgcaacccttcagcgccccaggcctgcggacccgatgcctcttcctgctgagatccctccagtttttcccagtgggaagttgggaccaagcacaaactccatgtctggtggggtacagactccaagggaagactgggctccaaagccacatgcctttgttggcagcgtcaagaatgagaagacttttgtggggggtcctcttaaggcaaatgccgagaacaggaaagctactgggcatagtcccctggaactggtgggtcacttggaagggatgccctttgtcatggacttgcccttctggaaattaccccgagagccagggaaggggctcagtgagcctctggagccttcttctctcccctcccaactcagcatcaagcaggcattttatgggaagctttctaaactccaactgagttccaccagctttaattattcctctagctctcccacctttcccaaaggccttgctggaagtgtggtgcagctgagccacaaagcaaactttggtgcgagccacagtgcatcactttccttgcaaatgttcactgacagcagcacggtggaaagcatctcgctccagtgtgcgtgcagcctgaaagccatgatcatgtgccaaggctgcggtgcgttctgtcacgatgactgtattggaccctcaaagctctgtgtattgtgccttgtggtgagataataaattatggccatgggaaacattgtatatttagtgtgtgtattttgataatgattgatcttaaatctgtatacagaatatcattgatataatactctttaggcaggagcactcttgccttcccccaaaatttacactgctaaagccctctgtcacttggcgacccttctggtcttgctggaggggtttcctgggtataacccattgggctgcccaaggccagccagcctgagctctcctgcaagacagagcctgatgtggcacggagtggggttgcggggggtggggggactgcctgactcccagagggacttgaaactgaagcaagaaggttgcattctccaccaagggagttaacctacctgaactaagtagaaatgccagtcttccactaccccctccctgccatcttttcttctgctactttggggagttgatggccaggaaagaagccagcacagggttaaagtaactcctggcattgcccaccagggggctggtgcacctgctgacctcagggtcacagttgagtcatttgccagttgacggagcaagtttgaccttggttctgttgctgaagcaaatttggaacttttctgtctcagtgtgatccactaacccacaggatcatttggaaccttgaatagctctgcttggacaatggggttggggaatagggttgtctttcctatgaaaatgccatctgtagaccttgtgagtcagccgtccagatgtttgcaggtgaattcctctgcttgacatcctccctgtcactttggaccctatgggagtgggcatctccacgcacctgtgtatgtgaaagtcattttacatttcaaagcagtgtgtgtttcttatttttatatttttaactctttattcttggatgtataaagtgaactttttggcttctgtaagtatgctctatgcacctctaatgttttatcatgtatttatatgttgtacacagtactggctgattctgtaaatggatgtattgtacagagaacatgaacgtctcttcctaattttacatcttcagcatcattgcattaaagtggtgtaatctccttctctacatctgttgtcagagccactgagtgctgtgctgctcgacgtgagggtgaaatgattgacttgtgacctgccaggttgcccgatgccctgttgggtcaccggctggacctgctgcagcctgcagagccacagtcagcctgcccacatgccaccgagcaaacgcatcttgcttttcacatctctcctcctacagccttaatggctgcttgctgccatatgtgacaaatcaccaccaccagtgttaagtgcttctggattcatgggtgagttccctgggcagcccccaggaaggccttccagatctggctccagggtcaccacctgtcacagcaatacctgggaccatgctctcctgggactgtgaggctccttttgacgtacttttgacatcaggcaggtttgggaagaaacaaagccatgcctgctcctgcctctctcccaacatgtttccagcaagtagatgcccctgtgtgtgttttcccttgccttgtttcctgccttatatcttgtatttcgacttattacagagttgagggttcttgcttaatttagatcaagtataaaatttgtatgacttcaagtctcattttatctgaaaggtttttttctcatttaatctgatgtggcattttcgtcatctgaagcatgagtgacaagttgggaatgatgtggtgatttagaatgcagtattggccaagtccaagttgtcaacttaagcgtctgtttaccaaagaccgggaacaggggcccaaacatgtccagtcctcttcttccctctgctggaacctttggggacactcaagggtacagtttgacactgatctggtccatgaggctgcccagag

SEQ ID NO: 268 - RNA, 3146 nt, Homo sapiens
  source 1..3146: mol_type = other RNA
cacacacactcacacacacccacggcagacacgcacgcacccgggcgccgaagggaaagccgcgtctcgccctcccgccccgccgtcggtcctgtctcagtccctcagcagagcgggaaagcggaggccggagccgtgacctctgaccccgtggttatgcggagccgccgcattccttagcgatcgcggggcagccgccgctgccgccgtgggcgactgacgcagcgcgggcgcgtggagccgccgccgcccctcccccaccgccgctctcgcgccagccggtccccgcgtgcccgccccttctccccggccgcacccgagacctcgcgcgccgccgctgccacgcgccccccccaccgccgccgccgccccagccccgcgccaccgccccagcccgcccagcccggaggtcccgcgtggagctgccgccgccgccggggagaaggatgaaggacaaacagaagaagaagaaggagcgcacgtgggccgaggccgcgcgcctggtattagaaaactactcggatgctccaatgacaccaaaacagattctgcaggtcatagaggcagaaggactaaaggaaatgagaagtgggacttcccctctcgcatgcctcaatgctatgctacattccaattcaagaggaggagaggggttgttttataaactgcctggccgaatcagccttttcacgctcaagaaggatgccctgcagtggtctcgccatccagctacagtggagggagaggagccagaggacacggctgatgtggagagctgtgggtctaatgaagccagcactgtgagtggtgaaaacgatgtatctcttgatgaaacatcttcgaacgcatcctgttctacagaatctcagagtcgacctctttccaatcccagggacagctacagagcttcctcacaggcgaacaaacaaaagaaaaagactggggtgatgctgcctcgagttgtcctgactcctctgaaggtaaacggggcccacgtggaatctgcatcagggttctcgggctgccacgccgatggcgagagcggcagcccgtccagcagcagcagcggctctctggccctgggcagcgctgctattcgtggccaggccgaggtcacccaggaccctgccccgctcctgagaggcttccggaagccagccacaggtcaaatgaagcgcaacagaggggaagaaatagattttgagacacctgggtccattcttgtcaacaccaacctccgtgccctgatcaactctcggaccttccatgccttaccatcacacttccagcagcagctcctcttcctcctgcctgaagtagacagacaggtggggacggatggcctgttgcgtctcagcagcagtgcactaaataacgagttttttacccatgcggctcagagctggcgggagcgcctggctgatggtgaatttactcatgagatgcaagtcaggatacgacaggaaatggagaaggaaaagaaggtggaacaatggaaagaaaagttctttgaagactactatggacagaagctgggtttgaccaaagaagagtcattgcagcagaacgtgggccaggaggaggctgaaatcaaaagtggcttgtgtgtcccaggagaatcagtgcgtatacagcgtggtccagccacccgacagcgagatgggcattttaagaaacgctctcggccagatctccgaaccagagccagaaggaatctgtacaaaaaacaggagtcagaacaagcaggggttgctaaggatgcaaaatctgtggcctcagatgttcccctctacaaggatggggaggctaagactgacccagcagggctgagcagtccccatctgccaggcacatcctctgcagcacccgacctggagggtcccgaattcccagttgagtctgtggcttctcggatccaggctgagccagacaacttggcacgtgcctctgcatctccagacagaattcctagcctgcctcaggaaactgtggatcaggaacccaaggatcagaagaggaaatcctttgagcaggcggcctctgcatcctttcccgaaaagaagccccggcttgaagatcgtcagtcctttcgtaacacaattgaaagtgttcacaccgaaaagccacagcccactaaagaggagcccaaagtcccgcccatccggattcaactttcacgtatcaaaccaccctgggtggttaaaggtcagcccacttaccagatatgcccccggatcatccccaccacggagtcctcctgccggggttggactggcgccaggaccctcgcagacattaaagcccgtgctctgcagagccactgagtgctgtgctgctcgacgtgagggtgaaatgattgacttgtgacctgccaggttgcccgatgccctgttgggtcaccggctggacctgctgcagcctgcagagccacagtcagcctgcccacatgccaccgagcaaacgcatcttgcttttcacatctctcctcctacagccttaatggctgcttgctgccatatgtgacaaatcaccaccaccagtgttaagtgcttctggattcatgggtgagttccctgggcagcccccaggaaggccttccagatctggctccagggtcaccacctgtcacagcaatacctgggaccatgctctcctgggactgtgaggctccttttgacgtacttttgacatcaggcaggtttgggaagaaacaaagccatgcctgctcctgcctctctcccaacatgtttccagcaagtagatgcccctgtgtgtgttttcccttgccttgtttcctgccttatatcttgtatttcgacttattacagagttgagggttcttgcttaatttagatcaagtataaaatttgtatgacttcaagtctcattttatctgaaaggtttttttctcatttaatctgatgtggcattttcgtcatctgaagcatgagtgacaagttgggaatgatgtggtgatttagaatgcagtattggccaagtccaagttgtcaacttaagcgtctgtttaccaaagaccgggaacaggggcccaaacatgtccagtcctcttcttccctctgctggaacctttggggacactcaagggtacagtttgacactgatctggtccatgaggctgcccagag

SEQ ID NO: 269 - RNA, 7052 nt, Homo sapiens
  source 1..7052: mol_type = other RNA
acacacactcacacacacccacggcagacacgcacgcacccgggcgccgaagggaaagccgcgtctcgccctcccgccccgccgtcggtcctgtctcagtccctcagcagagcgggaaagcggaggccggagccgtgacctctgaccccgtggttatgcggagccgccgcattccttagcgatcgcggggcagccgccgctgccgccgtgggcgactgacgcagcgcgggcgcgtggagccgccgccgcccctcccccaccgccgctctcgcgccagccggtccccgcgtgcccgccccttctccccggccgcacccgagacctcgcgcgccgccgctgccacgcgccccccccaccgccgccgccgccccagccccgcgccaccgccccagcccgcccagcccggaggtcccgcgtggagctgccgccgccgccggggagaaggatgaaggacaaacagaagaagaagaaggagcgcacgtgggccgaggccgcgcgcctggtattagaaaactactcggatgctccaatgacaccaaaacagattctgcaggtcatagaggcagaaggactaaaggaaatgagaagtgggacttcccctctcgcatgcctcaatgctatgctacattccaattcaagaggaggagaggggttgttttataaactgcctggccgaatcagccttttcacgctcaagaaggatgccctgcagtggtctcgccatccagctacagtggagggagaggagccagaggacacggctgatgtggagagctgtgggtctaatgaagccagcactgtgagtggtgaaaacgatgtatctcttgatgaaacatcttcgaacgcatcctgttctacagaatctcagagtcgacctctttccaatcccagggacagctacagagcttcctcacaggcgaacaaacaaaagaaaaagactggggtgatgctgcctcgagttgtcctgactcctctgaaggtaaacggggcccacgtggaatctgcatcagggttctcgggctgccacgccgatggcgagagcggcagcccgtccagcagcagcagcggctctctggccctgggcagcgctgctattcgtggccaggccgaggtcacccaggaccctgccccgctcctgagaggcttccggaagccagccacaggtcaaatgaagcgcaacagaggggaagaaatagattttgagacacctgggtccattcttgtcaacaccaacctccgtgccctgatcaactctcggaccttccatgccttaccatcacacttccagcagcagctcctcttcctcctgcctgaagtagacagacaggtggggacggatggcctgttgcgtctcagcagcagtgcactaaataacgagttttttacccatgcggctcagagctggcgggagcgcctggctgatggtgaatttactcatgagatgcaagtcaggatacgacaggaaatggagaaggaaaagaaggtggaacaatggaaagaaaagttctttgaagactactatggacagaagctgggtttgaccaaagaagagtcattgcagcagaacgtgggccaggaggaggctgaaatcaaaagtggcttgtgtgtcccaggagaatcagtgcgtatacagcgtggtccagccacccgacagcgagatgggcattttaagaaacgctctcggccagatctccgaaccagagccagaaggaatctgtacaaaaaacaggagtcagaacaagcaggggttgctaaggatgcaaaatctgtggcctcagatgttcccctctacaaggatggggaggctaagactgacccagcagggctgagcagtccccatctgccaggcacatcctctgcagcacccgacctggagggtcccgaattcccagttgagtctgtggcttctcggatccaggctgagccagacaacttggcacgtgcctctgcatctccagacagaattcctagcctgcctcaggaaactgtggatcaggaacccaaggatcagaagaggaaatcctttgagcaggcggcctctgcatcctttcccgaaaagaagccccggcttgaagatcgtcagtcctttcgtaacacaattgaaagtgttcacaccgaaaagccacagcccactaaagaggagcccaaagtcccgcccatccggattcaactttcacgtatcaaaccaccctgggtggttaaaggtcagcccacttaccagatatgcccccggatcatccccaccacggagtcctcctgccggggttggactggcgccaggaccctcgcagacattaaagcccgtgctctgcaggtccgaggggcgagaggtcaccactgccatagagaggcggccaccactgccatcggaggggggggtggcccgggtggaggtggcggcggggccaccgatgagggaggtggcagaggcagcagcagtggtgatggtggtgaggcctgtggccaccctgagcccaggggaggcccgagcacccctggaaagtgtacgtcagatctacagcgaacacaactactgccgccttatcctctaaatggggagcatacccaggccggaactgccatgtccagagctaggagagaggacctgccttctctgagaaaggaggaaagctgcctactacagagggctacagttggactcacagatgggctaggagatgcctcccaactccccgttgctcccactggggaccagccatgccaggccttgcccctactgtcctcccaaacctcagtagctgagagattagtggagcagcctcagttgcatccggatgttagaactgaatgtgagtctggcaccacttcctgggaaagtgatgatgaggagcaaggacccaccgttcctgcagacaatggtcccattccgtctctagtgggagatgatacattagagaaaggaactggccaagctcttgacagtcatcccactatgaaggatcctgtaaatgtgacccccagttccacacctgaatcctcaccgactgattgcctgcagaacagagcatttgatgacgaattagggcttggtggctcatgccctcctatgagggaaagtgatactagacaagaaaacttgaaaaccaaggctctcgtttctaacagttctttgcattggatacccatcccatcgaatgatgaggtagtgaaacagcccaaaccagaatccagagaacacataccatctgttgagccccaggttggagaggagtgggagaaagctgctcccacccctcctgcattgcctggggatttgacagctgaggagggtctagatcctcttgacagccttacttcactctggactgtgccatctcgaggaggcagtgacagcaatggcagttactgtcaacaggtggacattgaaaagctgaaaatcaacggagactctgaagcactgagtcctcacggtgagtccacggatacagcctctgactttgaaggtcacctcacggaggacagcagtgaggctgacactagagaagctgcagtgacaaagggatcttcggtggacaaggatgagaaacccaattggaaccaatctgccccactgtccaaggtgaatggtgacatgcgtctggttacaaggacagatgggatggttgctcctcagagctgggtgtctcgagtatgtgcggtccgccaaaagatcccagattccctactgctggccagtactgagtaccagccaagagccgtgtgcctgtccatgcctgggtcctcagtggaggccactaacccacttgtgatgcagttgctgcagggtagcttgcccctagagaaggttcttccaccagcccacgatgacagcatgtcagaatccccacaagtaccacttacaaaagaccagagccatggctcgctacgcatgggatctttacatggtcttggaaaaaacagtggcatggttgatggaagcagccccagttctttaagggctttgaaggagcctcttctgccagatagctgtgaaacaggcactggtcttgccaggattgaggccacccaggctcctggagcaccccaaaagaattgcaaggcagtcccaagttttgactccctccatccagtgacaaatcccattacatcctctaggaaactggaagaaatggattccaaagagcagttctcttcctttagttgtgaagatcagaaggaagtccgtgctatgtcacaggacagtaattcaaatgctgctccaggaaagagcccaggagatcttactacctcgagaacacctcgtttctcatctccaaatgtgatctcctttggtccagagcagacaggtcgggccctgggtgatcagagcaatgttacaggccaagggaagaagctttttggctctgggaatgtggctgcaacccttcagcgccccaggcctgcggacccgatgcctcttcctgctgagatccctccagtttttcccagtgggaagttgggaccaagcacaaactccatgtctggtggggtacagactccaagggaagactgggctccaaagccacatgcctttgttggcagcgtcaagaatgagaagacttttgtggggggtcctcttaaggcaaatgccgagaacaggaaagctactgggcatagtcccctggaactggtgggtcacttggaagggatgccctttgtcatggacttgcccttctggaaattaccccgagagccagggaaggggctcagtgagcctctggagccttcttctctcccctcccaactcagcatcaagcaggcattttatgggaagctttctaaactccaactgagttccaccagctttaattattcctctagctctcccacctttcccaaaggccttgctggaagtgtggtgcagctgagccacaaagcaaactttggtgcgagccacagtgcatcactttccttgcaaatgttcactgacagcagcacggtggaaagcatctcgctccagtgtgcgtgcagcctgaaagccatgatcatgtgccaaggctgcggtgcgttctgtcacgatgactgtattggaccctcaaagctctgtgtattgtgccttgtggtgagataataaattatggccatgggaaacattgtatatttagtgtgtgtattttgataatgattgatcttaaatctgtatacagaatatcattgatataatactctttaggcaggagcactcttgccttcccccaaaatttacactgctaaagccctctgtcacttggcgacccttctggtcttgctggaggggtttcctgggtataacccattgggctgcccaaggccagccagcctgagctctcctgcaagacagagcctgatgtggcacggagtggggttgcggggggtggggggactgcctgactcccagagggacttgaaactgaagcaagaaggttgcattctccaccaagggagttaacctacctgaactaagtagaaatgccagtcttccactaccccctccctgccatcttttcttctgctactttggggagttgatggccaggaaagaagccagcacagggttaaagtaactcctggcattgcccaccagggggctggtgcacctgctgacctcagggtcacagttgagtcatttgccagttgacggagcaagtttgaccttggttctgttgctgaagcaaatttggaacttttctgtctcagtgtgatccactaacccacaggatcatttggaaccttgaatagctctgcttggacaatggggttggggaatagggttgtctttcctatgaaaatgccatctgtagaccttgtgagtcagccgtccagatgtttgcaggtgaattcctctgcttgacatcctccctgtcactttggaccctatgggagtgggcatctccacgcacctgtgtatgtgaaagtcattttacatttcaaagcagtgtgtgtttcttatttttatatttttaactctttattcttggatgtataaagtgaactttttggcttctgtaagtatgctctatgcacctctaatgttttatcatgtatttatatgttgtacacagtactggctgattctgtaaatggatgtattgtacagagaacatgaacgtctcttcctaattttacatcttcagcatcattgcattaaagtggtgtaatctccttctctacatctgttgtcagagccactgagtgctgtgctgctcgacgtgagggtgaaatgattgacttgtgacctgccaggttgcccgatgccctgttgggtcaccggctggacctgctgcagcctgcagagccacagtcagcctgcccacatgccaccgagcaaacgcatcttgcttttcacatctctcctcctacagccttaatggctgcttgctgccatatgtgacaaatcaccaccaccagtgttaagtgcttctggattcatgggtgagttccctgggcagcccccaggaaggccttccagatctggctccagggtcaccacctgtcacagcaatacctgggaccatgctctcctgggactgtgaggctccttttgacgtacttttgacatcaggcaggtttgggaagaaacaaagccatgcctgctcctgcctctctcccaacatgtttccagcaagtagatgcccctgtgtgtgttttcccttgccttgtttcctgccttatatcttgtatttcgacttattacagagttgagggttcttgcttaatttagatcaagtataaaatttgtatgacttcaagtctcattttatctgaaaggtttttttctcatttaatctgatgtggcattttcgtcatctgaagcatgagtgacaagttgggaatgatgtggtgatttagaatgcagtattggccaagtccaagttgtcaacttaagcgtctgtttaccaaagaccgggaacaggggcccaaacatgtccagtcctcttcttccctctgctggaacctttggggacactcaagggtacagtttgacactgatctggtccatgaggctgcccagagaaagcactgcttctgtatgtctcttgtggtattggaacaataaacccgtacaacctgca

SEQ ID NO: 270 - RNA, 1068 nt, Homo sapiens
  source 1..1068: mol_type = other RNA
cacacccacggcagacacgcacgcacccgggcgccgaagggaaagccgcgtctcgccctcccgccccgccgtcggtcctgtctcagtccctcagcagagcgggaaagcggaggccggagccgtgacctctgaccccgtggttatgcggagccgccgcattccttagcgatcgcggggcagccgccgctgccgccgtgggcgactgacgcagcgcgggcgcgtggagccgccgccgcccctcccccaccgccgctctcgcgccagccggtccccgcgtgcccgccccttctccccggccgcacccgagacctcgcgcgccgccgctgccacgcgccccccccaccgccgccgccgccccagccccgcgccaccgccccagcccgcccagcccggaggtcccgcgtggagctgccgccgccgccggggagaaggatgaaggacaaacagaagaagaagaaggagcgcacgtgggccgaggccgcgcgcctggtattagaaaactactcggatgctccaatgacaccaaaacagattctgcaggtcatagaggcagaaggactaaaggaaatgaggagtgggacttcccctctcgcatgcctcaatgctatgctacattccaattcaagaggaggagaggggttgttttataaactgcctggccgaatcagccttttcacgctcaaggtgtgagccactgcaccaggccccttcatcttaattttaatatatctttgaataaacaccattgtatgaacctgctgtaagcttgggagtggtctgttagtctacagcttgtgtctgagatgtgctaattgaatatttgctcagtacctcatcttaactgcctttggctttatgttgcttatccttcatagtatcttgttcattggccttttacatccataggcatcacttctctgatattcgttgtgctcttttaatggattaatggtttgcttggttggttcctctagttagactgtaaactccttgagagcagagtctgtattttattaattacccacagtactaggtacatagttgccttcaataaatatatatttaatg

SEQ ID NO: 271 - RNA, 7038 nt, Homo sapiens
  source 1..7038: mol_type = other RNA
cacacccacggcagacacgcacgcacccgggcgccgaagggaaagccgcgtctcgccctcccgccccgccgtcggtcctgtctcagtccctcagcagagcgggaaagcggaggccggagccgtgacctctgaccccgtggttatgcggagccgccgcattccttagcgatcgcggggcagccgccgctgccgccgtgggcgactgacgcagcgcgggcgcgtggagccgccgccgcccctcccccaccgccgctctcgcgccagccggtccccgcgtgcccgccccttctccccggccgcacccgagacctcgcgcgccgccgctgccacgcgccccccccaccgccgccgccgccccagccccgcgccaccgccccagcccgcccagcccggaggtcccgcgtggagctgccgccgccgccggggagaaggatgaaggacaaacagaagaagaagaaggagcgcacgtgggccgaggccgcgcgcctggtattagaaaactactcggatgctccaatgacaccaaaacagattctgcaggtcatagaggcagaaggactaaaggaaatgaggagtgggacttcccctctcgcatgcctcaatgctatgctacattccaattcaagaggaggagaggggttgttttataaactgcctggccgaatcagccttttcacgctcaagaaggatgccctgcagtggtctcgccatccagctacagtggagggagaggagccagaggacacggctgatgtggagagctgtgggtctaatgaagccagcactgtgagtggtgaaaacgatgtatctcttgatgaaacatcttcgaacgcatcctgttctacagaatctcagagtcgacctctttccaatcccagggacagctacagagcttcctcacaggcgaacaaacaaaagaaaaagactggggtgatgctgcctcgagttgtcctgactcctctgaaggtaaacggggcccacgtggaatctgcatcagggttctcgggctgccacgccgatggcgagagcggcagcccgtccagcagcagcagcggctctctggccctgggcagcgctgctattcgtggccaggccgaggtcacccaggaccctgccccgctcctgagaggcttccggaagccagccacaggtcaaatgaagcgcaacagaggggaagaaatagattttgagacacctgggtccattcttgtcaacaccaacctccgtgccctgatcaactctcggaccttccatgccttaccatcacacttccagcagcagctcctcttcctcctgcctgaagtagacagacaggtggggacggatggcctgttgcgtctcagcagcagtgcactaaataacgagttttttacccatgcggctcagagctggcgggagcgcctggctgatggtgaatttactcatgagatgcaagtcaggatacgacaggaaatggagaaggaaaagaaggtggaacaatggaaagaaaagttctttgaagactactatggacagaagctgggtttgaccaaagaagagtcattgcagcagaacgtgggccaggaggaggctgaaatcaaaagtggcttgtgtgtcccaggagaatcagtgcgtatacagcgtggtccagccacccgacagcgagatgggcattttaagaaacgctctcggccagatctccgaaccagagccagaaggaatctgtacaaaaaacaggagtcagaacaagcaggggttgctaaggatgcaaaatctgtggcctcagatgttcccctctacaaggatggggaggctaagactgacccagcagggctgagcagtccccatctgccaggcacatcctctgcagcacccgacctggagggtcccgaattcccagttgagtctgtggcttctcggatccaggctgagccagacaacttggcacgtgcctctgcatctccagacagaattcctagcctgcctcaggaaactgtggatcaggaacccaaggatcagaagaggaaatcctttgagcaggcggcctctgcatcctttcccgaaaagaagccccggcttgaagatcgtcagtcctttcgtaacacaattgaaagtgttcacaccgaaaagccacagcccactaaagaggagcccaaagtcccgcccatccggattcaactttcacgtatcaaaccaccctgggtggttaaaggtcagcccacttaccagatatgcccccggatcatccccaccacggagtcctcctgccggggttggactggcgccaggaccctcgcagacattaaagcccgtgctctgcaggtccgaggggcgagaggtcaccactgccatagagaggcggccaccactgccatcggaggggggggtggcccgggtggaggtggcggcggggccaccgatgagggaggtggcagaggcagcagcagtggtgatggtggtgaggcctgtggccaccctgagcccaggggaggcccgagcacccctggaaagtgtacgtcagatctacagcgaacacaactactgccgccttatcctctaaatggggagcatacccaggccggaactgccatgtccagagctaggagagaggacctgccttctctgagaaaggaggaaagctgcctactacagagggctacagttggactcacagatgggctaggagatgcctcccaactccccgttgctcccactggggaccagccatgccaggccttgcccctactgtcctcccaaacctcagtagctgagagattagtggagcagcctcagttgcatccggatgttagaactgaatgtgagtctggcaccacttcctgggaaagtgatgatgaggagcaaggacccaccgttcctgcagacaatggtcccattccgtctctagtgggagatgatacattagagaaaggaactggccaagctcttgacagtcatcccactatgaaggatcctgtaaatgtgacccccagttccacacctgaatcctcaccgactgattgcctgcagaacagagcatttgatgacgaattagggcttggtggctcatgccctcctatgagggaaagtgatactagacaagaaaacttgaaaaccaaggctctcgtttctaacagttctttgcattggatacccatcccatcgaatgatgaggtagtgaaacagcccaaaccagaatccagagaacacataccatctgttgagccccaggttggagaggagtgggagaaagctgctcccacccctcctgcattgcctggggatttgacagctgaggagggtctagatcctcttgacagccttacttcactctggactgtgccatctcgaggaggcagtgacagcaatggcagttactgtcaacaggtggacattgaaaagctgaaaatcaacggagactctgaagcactgagtcctcacggtgagtccacggatacagcctctgactttgaaggtcacctcacggaggacagcagtgaggctgacactagagaagctgcagtgacaaagggatcttcggtggacaaggatgagaaacccaattggaaccaatctgccccactgtccaaggtgaatggtgacatgcgtctggttacaaggacagatgggatggttgctcctcagagctgggtgtctcgagtatgtgcggtccgccaaaagatcccagattccctactgctggccagtactgagtaccagccaagagccgtgtgcctgtccatgcctgggtcctcagtggaggccactaacccacttgtgatgcagttgctgcagggtagcttgcccctagagaaggttcttccaccagcccacgatgacagcatgtcagaatccccacaagtaccacttacaaaagaccagagccatggctcgctacgcatgggatctttacatggtcttggaaaaaacagtggcatggttgatggaagcagccccagttctttaagggctttgaaggagcctcttctgccagatagctgtgaaacaggcactggtcttgccaggattgaggccacccaggctcctggagcaccccaaaagaattgcaaggcagtcccaagttttgactccctccatccagtgacaaatcccattacatcctctaggaaactggaagaaatggattccaaagagcagttctcttcctttagttgtgaagatcagaaggaagtccgtgctatgtcacaggacagtaattcaaatgctgctccaggaaagagcccaggagatcttactacctcgagaacacctcgtttctcatctccaaatgtgatctcctttggtccagagcagacaggtcgggccctgggtgatcagagcaatgttacaggccaagggaagaagctttttggctctgggaatgtggctgcaacccttcagcgccccaggcctgcggacccgatgcctcttcctgctgagatccctccagtttttcccagtgggaagttgggaccaagcacaaactccatgtctggtggggtacagactccaagggaagactgggctccaaagccacatgcctttgttggcagcgtcaagaatgagaagacttttgtggggggtcctcttaaggcaaatgccgagaacaggaaagctactgggcatagtcccctggaactggtgggtcacttggaagggatgccctttgtcatggacttgcccttctggaaattaccccgagagccagggaaggggctcagtgagcctctggagccttcttctctcccctcccaactcagcatcaagcaggcattttatgggaagctttctaaactccaactgagttccaccagctttaattattcctctagctctcccacctttcccaaaggccttgctggaagtgtggtgcagctgagccacaaagcaaactttggtgcgagccacagtgcatcactttccttgcaaatgttcactgacagcagcacggtggaaagcatctcgctccagtgtgcgtgcagcctgaaagccatgatcatgtgccaaggctgcggtgcgttctgtcacgatgactgtattggaccctcaaagctctgtgtattgtgccttgtggtgagataataaattatggccatgggaaacattgtatatttagtgtgtgtattttgataatgattgatcttaaatctgtatacagaatatcattgatataatactctttaggcaggagcactcttgccttcccccaaaatttacactgctaaagccctctgtcacttggcgacccttctggtcttgctggaggggtttcctgggtataacccattgggctgcccaaggccagccagcctgagctctcctgcaagacagagcctgatgtggcacggagtggggttgcggggggtggggggactgcctgactcccagagggacttgaaactgaagcaagaaggttgcattctccaccaagggagttaacctacctgaactaagtagaaatgccagtcttccactaccccctccctgccatcttttcttctgctactttggggagttgatggccaggaaagaagccagcacagggttaaagtaactcctggcattgcccaccagggggctggtgcacctgctgacctcagggtcacagttgagtcatttgccagttgacggagcaagtttgaccttggttctgttgctgaagcaaatttggaacttttctgtctcagtgtgatccactaacccacaggatcatttggaaccttgaatagctctgcttggacaatggggttggggaatagggttgtctttcctatgaaaatgccatctgtagaccttgtgagtcagccgtccagatgtttgcaggtgaattcctctgcttgacatcctccctgtcactttggaccctatgggagtgggcatctccacgcacctgtgtatgtgaaagtcattttacatttcaaagcagtgtgtgtttcttatttttatatttttaactctttattcttggatgtataaagtgaactttttggcttctgtaagtatgctctatgcacctctaatgttttatcatgtatttatatgttgtacacagtactggctgattctgtaaatggatgtattgtacagagaacatgaacgtctcttcctaattttacatcttcagcatcattgcattaaagtggtgtaatctccttctctacatctgttgtcagagccactgagtgctgtgctgctcgacgtgagggtgaaatgattgacttgtgacctgccaggttgcccgatgccctgttgggtcaccggctggacctgctgcagcctgcagagccacagtcagcctgcccacatgccaccgagcaaacgcatcttgcttttcacatctctcctcctacagccttaatggctgcttgctgccatatgtgacaaatcaccaccaccagtgttaagtgcttctggattcatgggtgagttccctgggcagcccccaggaaggccttccagatctggctccagggtcaccacctgtcacagcaatacctgggaccatgctctcctgggactgtgaggctccttttgacgtacttttgacatcaggcaggtttgggaagaaacaaagccatgcctgctcctgcctctctcccaacatgtttccagcaagtagatgcccctgtgtgtgttttcccttgccttgtttcctgccttatatcttgtatttcgacttattacagagttgagggttcttgcttaatttagatcaagtataaaatttgtatgacttcaagtctcattttatctgaaaggtttttttctcatttaatctgatgtggcattttcgtcatctgaagcatgagtgacaagttgggaatgatgtggtgatttagaatgcagtattggccaagtccaagttgtcaacttaagcgtctgtttaccaaagaccgggaacaggggcccaaacatgtccagtcctcttcttccctctgctggaacctttggggacactcaagggtacagtttgacactgatctggtccatgaggctgcccagagaaagcactgcttctgtatgtctcttgtggtattggaacaataaacccgtacaacctgc

SEQ ID NO: 272 - RNA, 1065 nt, Homo sapiens
  source 1..1065: mol_type = other RNA
ccacggcagacacgcacgcacccgggcgccgaagggaaagccgcgtctcgccctcccgccccgccgtcggtcctgtctcagtccctcagcagagcgggaaagcggaggccggagccgtgacctctgaccccgtggttatgcggagccgccgcattccttagcgatcgcggggcagccgccgctgccgccgtgggcgactgacgcagcgcgggcgcgtggagccgccgccgcccctcccccaccgccgctctcgcgccagccggtccccgcgtgcccgccccttctccccggccgcacccgagacctcgcgcgccgccgctgccacgcgccccccccaccgccgccgccgccccagccccgcgccaccgccccagcccgcccagcccggaggtcccgcgtggagctgccgccgccgccggggagaaggatgaaggacaaacagaagaagaagaaggagcgcacgtgggccgaggccgcgcgcctggtattagaaaactactcggatgctccaatgacaccaaaacagattctgcaggtcatagaggcagaaggactaaaggaaatgagaagtgggacttcccctctcgcatgcctcaatgctatgctacattccaattcaagaggaggagaggggttgttttataaactgcctggccgaatcagccttttcacgctcaaggtgtgagccactgcaccaggccccttcatcttaattttaatatatctttgaataaacaccattgtatgaacctgctgtaagcttgggagtggtctgttagtctacagcttgtgtctgagatgtgctaattgaatatttgctcagtacctcatcttaactgcctttggctttatgttgcttatccttcatagtatcttgttcattggccttttacatccataggcatcacttctctgatattcgttgtgctcttttaatggattaatggtttgcttggttggttcctctagttagactgtaaactccttgagagcagagtctgtattttattaattacccacagtactaggtacatagttgccttcaataaatatatatttaatgaa

SEQ ID NO: 273 - RNA, 5374 nt, Homo sapiens
  source 1..5374: mol_type = other RNA
cgtcggtcctgtctcagtccctcagcagagcgggaaagcggaggccggagccgtgacctctgaccccgtggttatgcggagccgccgcattccttagcgatcgcggggcagccgccgctgccgccgtgggcgactgacgcagcgcgggcgcgtggagccgccgccgcccctcccccaccgccgccggggagaaggatgaaggacaaacagaagaagaagaaggagcgcacgtgggccgaggccgcgcgcctggtattagaaaactactcggatgctccaatgacaccaaaacagattctgcaggtcatagaggcagaaggactaaaggaaatgaggagtgggacttcccctctcgcatgcctcaatgctatgctacattccaattcaagaggaggagaggggttgttttataaactgcctggccgaatcagccttttcacgctcaagaaggatgccctgcagtggtctcgccatccagctacagtggagggagaggagccagaggacacggctgatgtggagagctgtgggtctaatgaagccagcactgtgagtggtgaaaacgatgtatctcttgatgaaacatcttcgaacgcatcctgttctacagaatctcagagtcgacctctttccaatcccagggacagctacagagcttcctcacaggcgaacaaacaaaagaaaaagactggggtgatgctgcctcgagttgtcctgactcctctgaaggtaaacggggcccacgtggaatctgcatcagggttctcgggctgccacgccgatggcgagagcggcagcccgtccagcagcagcagcggctctctggccctgggcagcgctgctattcgtggccaggccgaggtcacccaggaccctgccccgctcctgagaggcttccggaagccagccacaggtcaaatgaagcgcaacagaggggaagaaatagattttgagacacctgggtccattcttgtcaacaccaacctccgtgccctgatcaactctcggaccttccatgccttaccatcacacttccagcagcagctcctcttcctcctgcctgaagtagacagacaggtggggacggatggcctgttgcgtctcagcagcagtgcactaaataacgagttttttacccatgcggctcagagctggcgggagcgcctggctgatggtgaatttactcatgagatgcaagtcaggatacgacaggaaatggagaaggaaaagaaggtggaacaatggaaagaaaagttctttgaagactactatggacagaagctgggtttgaccaaagaagagtcattgcagcagaacgtgggccaggaggaggctgaaatcaaaagtggcttgtgtgtcccaggagaatcagtgcgtatacagcgtggtccagccacccgacagcgagatgggcattttaagaaacgctctcggccagatctccgaaccagagccagaaggaatctgtacaaaaaacaggagtcagaacaagcaggggttgctaaggatgcaaaatctgtggcctcagatgttcccctctacaaggatggggaggctaagactgacccagcagggctgagcagtccccatctgccaggcacatcctctgcagcacccgacctggagggtcccgaattcccagttgagtctgtggcttctcggatccaggctgagccagacaacttggcacgtgcctctgcatctccagacagaattcctagcctgcctcaggaaactgtggatcaggaacccaaggatcagaagaggaaatcctttgagcaggcggcctctgcatcctttcccgaaaagaagccccggcttgaagatcgtcagtcctttcgtaacacaattgaaagtgttcacaccgaaaagccacagcccactaaagaggagcccaaagtcccgcccatccggattcaactttcacgtatcaaaccaccctgggtggttaaaggtcagcccacttaccagatatgcccccggatcatccccaccacggagtcctcctgccggggttggactggcgccaggaccctcgcagacattaaagcccgtgctctgcaggtccgaggggcgagaggtcaccactgccatagagaggcggccaccactgccatcggaggggggggtggcccgggtggaggtggcggcggggccaccgatgagggaggtggcagaggcagcagcagtggtgatggtggtgaggcctgtggccaccctgagcccaggggaggcccgagcacccctggaaagtgtacgtcagatctacagcgaacacaactactgccgccttatcctctaaatggggagcatacccaggccggaactgccatgtccagagctaggagagaggacctgccttctctgagaaaggaggaaagctgcctactacagagggctacagttggactcacagatgggctaggagatgcctcccaactccccgttgctcccactggggaccagccatgccaggccttgcccctactgtcctcccaaacctcagtagctgagagattagtggagcagcctcagttgcatccggatgttagaactgaatgtgagtctggcaccacttcctgggaaagtgatgatgaggagcaaggacccaccgttcctgcagacaatggtcccattccgtctctagtgggagatgatacattagagaaaggaactggccaagctcttgacagtcatcccactatgaaggatcctgtaaatgtgacccccagttccacacctgaatcctcaccgactgattgcctgcagaacagagcatttgatgacgaattagggcttggtggctcatgccctcctatgagggaaagtgatactagacaagaaaacttgaaaaccaaggctctcgtttctaacagttctttgcattggatacccatcccatcgaatgatgaggtagtgaaacagcccaaaccagaatccagagaacacataccatctgttgagccccaggttggagaggagtgggagaaagctgctcccacccctcctgcattgcctggggatttgacagctgaggagggtctagatcctcttgacagccttacttcactctggactgtgccatctcgaggaggcagtgacagcaatggcagttactgtcaacaggtggacattgaaaagctgaaaatcaacggagactctgaagcactgagtcctcacggtgagtccacggatacagcctctgactttgaaggtcacctcacggaggacagcagtgaggctgacactagagaagctgcagtgacaaagggatcttcggtggacaaggatgagaaacccaattggaaccaatctgccccactgtccaaggtgaatggtgacatgcgtctggttacaaggacagatgggatggttgctcctcagagctgggtgtctcgagtatgtgcggtccgccaaaagatcccagattccctactgctggccagtactgagtaccagccaagagccgtgtgcctgtccatgcctgggtcctcagtggaggccactaacccacttgtgatgcagttgctgcagggtagcttgcccctagagaaggttcttccaccagcccacgatgacagcatgtcagaatccccacaagtaccacttacaaaagaccagagccatggctcgctacgcatgggatctttacatggtcttggaaaaaacagtggcatggttgatggaagcagccccagttctttaagggctttgaaggagcctcttctgccagatagctgtgaaacaggcactggtcttgccaggattgaggccacccaggctcctggagcaccccaaaagaattgcaaggcagtcccaagttttgactccctccatccagtgacaaatcccattacatcctctaggaaactggaagaaatggattccaaagagcagttctcttcctttagttgtgaagatcagaaggaagtccgtgctatgtcacaggacagtaattcaaatgctgctccaggaaagagcccaggagatcttactacctcgagaacacctcgtttctcatctccaaatgtgatctcctttggtccagagcagacaggtcgggccctgggtgatcagagcaatgttacaggccaagggaagaagctttttggctctgggaatgtggctgcaacccttcagcgccccaggcctgcggacccgatgcctcttcctgctgagatccctccagtttttcccagtgggaagttgggaccaagcacaaactccatgtctggtggggtacagactccaagggaagactgggctccaaagccacatgcctttgttggcagcgtcaagaatgagaagacttttgtggggggtcctcttaaggcaaatgccgagaacaggaaagctactgggcatagtcccctggaactggtgggtcacttggaagggatgccctttgtcatggacttgcccttctggaaattaccccgagagccagggaaggggctcagtgagcctctggagccttcttctctcccctcccaactcagcatcaagcaggcattttatgggaagctttctaaactccaactgagttccaccagctttaattattcctctagctctcccacctttcccaaaggccttgctggaagtgtggtgcagctgagccacaaagcaaactttggtgcgagccacagtgcatcactttccttgcaaatgttcactgacagcagcacggtggaaagcatctcgctccagtgtgcgtgcagcctgaaagccatgatcatgtgccaaggctgcggtgcgttctgtcacgatgactgtattggaccctcaaagctctgtgtattgtgccttgtggtgagataataaattatggccatgggaaacattgtatatttagtgtgtgtattttgataatgattgatcttaaatctgtatacagaatatcattgatataatactctttaggcaggagcactcttgccttcccccaaaatttacactgctaaagccctctgtcacttggcgacccttctggtcttgctggaggggtttcctgggtataacccattgggctgcccaaggccagccagcctgagctctcctgcaagacagagcctgatgtggcacggagtggggttgcggggggtggggggactgcctgactcccagagggacttgaaactgaagcaagaaggttgcattctccaccaagggagttaacctacctgaactaagtagaaatgccagtcttccactaccccctccctgccatcttttcttctgctactttggggagttgatggccaggaaagaagccagcacagggttaaagtaactcctggcattgcccaccagggggctggtgcacctgctgacctcagggtcacagttgagtcatttgccagttgacggagca

SEQ ID NO: 274 - RNA, 6666 nt, Homo sapiens
  source 1..6666: mol_type = other RNA
aaattccggcggaggggcgagctggcaggccggctcctcccactctgggcagcggggtcccgcgtcccctcccccactatttggcagcgtctgggggtctggggcagcttcgttcattcacccgggggagttgggtttccgggaagggtcggaagctcctccctcgcttcctggtgggtaatggggtggtgcctttgactccgggggtggaaaagcgaccccacattcaaggacgccaatggcatgttgagctttcccaatctaaaccaggtattagaaaactactcggatgctccaatgacaccaaaacagattctgcaggtcatagaggcagaaggactaaaggaaatgagaagtgggacttcccctctcgcatgcctcaatgctatgctacattccaattcaagaggaggagaggggttgttttataaactgcctggccgaatcagccttttcacgctcaagaaggatgccctgcagtggtctcgccatccagctacagtggagggagaggagccagaggacacggctgatgtggagagctgtgggtctaatgaagccagcactgtgagtggtgaaaacgatgtatctcttgatgaaacatcttcgaacgcatcctgttctacagaatctcagagtcgacctctttccaatcccagggacagctacagagcttcctcacaggcgaacaaacaaaagaaaaagactggggtgatgctgcctcgagttgtcctgactcctctgaaggtaaacggggcccacgtggaatctgcatcaggtcaaatgaagcgcaacagaggggaagaaatagattttgagacacctgggtccattcttgtcaacaccaacctccgtgccctgatcaactctcggaccttccatgccttaccatcacacttccagcagcagctcctcttcctcctgcctgaagtagacagacaggtggggacggatggcctgttgcgtctcagcagcagtgcactaaataacgagttttttacccatgcggctcagagctggcgggagcgcctggctgatggtgaatttactcatgagatgcaagtcaggatacgacaggaaatggagaaggaaaagaaggtggaacaatggaaagaaaagttctttgaagactactatggacagaagctgggtttgaccaaagaagagtcattgcagcagaacgtgggccaggaggaggctgaaatcaaaagtggcttgtgtgtcccaggagaatcagtgcgtatacagcgtggtccagccacccgacagcgagatgggcattttaagaaacgctctcggccagatctccgaaccagagccagaaggaatctgtacaaaaaacaggagtcagaacaagcaggggttgctaaggatgcaaaatctgtggcctcagatgttcccctctacaaggatggggaggctaagactgacccagcagggctgagcagtccccatctgccaggcacatcctctgcagcacccgacctggagggtcccgaattcccagttgagtctgtggcttctcggatccaggctgagccagacaacttggcacgtgcctctgcatctccagacagaattcctagcctgcctcaggaaactgtggatcaggaacccaaggatcagaagaggaaatcctttgagcaggcggcctctgcatcctttcccgaaaagaagccccggcttgaagatcgtcagtcctttcgtaacacaattgaaagtgttcacaccgaaaagccacagcccactaaagaggagcccaaagtcccgcccatccggattcaactttcacgtatcaaaccaccctgggtggttaaaggtcagcccacttaccagatatgcccccggatcatccccaccacggagtcctcctgccggggttggactggcgccaggaccctcgcagacattaaagcccgtgctctgcaggtccgaggggcgagaggtcaccactgccatagagaggcggccaccactgccatcggaggggggggtggcccgggtggaggtggcggcggggccaccgatgagggaggtggcagaggcagcagcagtggtgatggtggtgaggcctgtggccaccctgagcccaggggaggcccgagcacccctggaaagtgtacgtcagatctacagcgaacacaactactgccgccttatcctctaaatggggagcatacccaggccggaactgccatgtccagagctaggagagaggacctgccttctctgagaaaggaggaaagctgcctactacagagggctacagttggactcacagatgggctaggagatgcctcccaactccccgttgctcccactggggaccagccatgccaggccttgcccctactgtcctcccaaacctcagtagctgagagattagtggagcagcctcagttgcatccggatgttagaactgaatgtgagtctggcaccacttcctgggaaagtgatgatgaggagcaaggacccaccgttcctgcagacaatggtcccattccgtctctagtgggagatgatacattagagaaaggaactggccaagctcttgacagtcatcccactatgaaggatcctgtaaatgtgacccccagttccacacctgaatcctcaccgactgattgcctgcagaacagagcatttgatgacgaattagggcttggtggctcatgccctcctatgagggaaagtgatactagacaagaaaacttgaaaaccaaggctctcgtttctaacagttctttgcattggatacccatcccatcgaatgatgaggtagtgaaacagcccaaaccagaatccagagaacacataccatctgttgagccccaggttggagaggagtgggagaaagctgctcccacccctcctgcattgcctggggatttgacagctgaggagggtctagatcctcttgacagccttacttcactctggactgtgccatctcgaggaggcagtgacagcaatggcagttactgtcaacaggtggacattgaaaagctgaaaatcaacggagactctgaagcactgagtcctcacggtgagtccacggatacagcctctgactttgaaggtcacctcacggaggacagcagtgaggctgacactagagaagctgcagtgacaaagggatcttcggtggacaaggatgagaaacccaattggaaccaatctgccccactgtccaaggtgaatggtgacatgcgtctggttacaaggacagatgggatggttgctcctcagagctgggtgtctcgagtatgtgcggtccgccaaaagatcccagattccctactgctggccagtactgagtaccagccaagagccgtgtgcctgtccatgcctgggtcctcagtggaggccactaacccacttgtgatgcagttgctgcagggtagcttgcccctagagaaggttcttccaccagcccacgatgacagcatgtcagaatccccacaagtaccacttacaaaagaccagagccatggctcgctacgcatgggatctttacatggtcttggaaaaaacagtggcatggttgatggaagcagccccagttctttaagggctttgaaggagcctcttctgccagatagctgtgaaacaggcactggtcttgccaggattgaggccacccaggctcctggagcaccccaaaagaattgcaaggcagtcccaagttttgactccctccatccagtgacaaatcccattacatcctctaggaaactggaagaaatggattccaaagagcagttctcttcctttagttgtgaagatcagaaggaagtccgtgctatgtcacaggacagtaattcaaatgctgctccaggaaagagcccaggagatcttactacctcgagaacacctcgtttctcatctccaaatgtgatctcctttggtccagagcagacaggtcgggccctgggtgatcagagcaatgttacaggccaagggaagaagctttttggctctgggaatgtggctgcaacccttcagcgccccaggcctgcggacccgatgcctcttcctgctgagatccctccagtttttcccagtgggaagttgggaccaagcacaaactccatgtctggtggggtacagactccaagggaagactgggctccaaagccacatgcctttgttggcagcgtcaagaatgagaagacttttgtggggggtcctcttaaggcaaatgccgagaacaggaaagctactgggcatagtcccctggaactggtgggtcacttggaagggatgccctttgtcatggacttgcccttctggaaattaccccgagagccagggaaggggctcagtgagcctctggagccttcttctctcccctcccaactcagcatcaagcaggcattttatgggaagctttctaaactccaactgagttccaccagctttaattattcctctagctctcccacctttcccaaaggccttgctggaagtgtggtgcagctgagccacaaagcaaactttggtgcgagccacagtgcatcactttccttgcaaatgttcactgacagcagcacggtggaaagcatctcgctccagtgtgcgtgcagcctgaaagccatgatcatgtgccaaggctgcggtgcgttctgtcacgatgactgtattggaccctcaaagctctgtgtattgtgccttgtggtgagataataaattatggccatgggaaacattgtatatttagtgtgtgtattttgataatgattgatcttaaatctgtatacagaatatcattgatataatactctttaggcaggagcactcttgccttcccccaaaatttacactgctaaagccctctgtcacttggcgacccttctggtcttgctggaggggtttcctgggtataacccattgggctgcccaaggccagccagcctgagctctcctgcaagacagagcctgatgtggcacggagtggggttgcggggggtggggggactgcctgactcccagagggacttgaaactgaagcaagaaggttgcattctccaccaagggagttaacctacctgaactaagtagaaatgccagtcttccactaccccctccctgccatcttttcttctgctactttggggagttgatggccaggaaagaagccagcacagggttaaagtaactcctggcattgcccaccagggggctggtgcacctgctgacctcagggtcacagttgagtcatttgccagttgacggagcaagtttgaccttggttctgttgctgaagcaaatttggaacttttctgtctcagtgtgatccactaacccacaggatcatttggaaccttgaatagctctgcttggacaatggggttggggaatagggttgtctttcctatgaaaatgccatctgtagaccttgtgagtcagccgtccagatgtttgcaggtgaattcctctgcttgacatcctccctgtcactttggaccctatgggagtgggcatctccacgcacctgtgtatgtgaaagtcattttacatttcaaagcagtgtgtgtttcttatttttatatttttaactctttattcttggatgtataaagtgaactttttggcttctgtaagtatgctctatgcacctctaatgttttatcatgtatttatatgttgtacacagtactggctgattctgtaaatggatgtattgtacagagaacatgaacgtctcttcctaattttacatcttcagcatcattgcattaaagtggtgtaatctccttctctacatctgttgtcagagccactgagtgctgtgctgctcgacgtgagggtgaaatgattgacttgtgacctgccaggttgcccgatgccctgttgggtcaccggctggacctgctgcagcctgcagagccacagtcagcctgcccacatgccaccgagcaaacgcatcttgcttttcacatctctcctcctacagccttaatggctgcttgctgccatatgtgacaaatcaccaccaccagtgttaagtgcttctggattcatgggtgagttccctgggcagcccccaggaaggccttccagatctggctccagggtcaccacctgtcacagcaatacctgggaccatgctctcctgggactgtgaggctccttttgacgtacttttgacatcaggcaggtttgggaagaaacaaagccatgcctgctcctgcctctctcccaacatgtttccagcaagtagatgcccctgtgtgtgttttcccttgccttgtttcctgccttatatcttgtatttcgacttattacagagttgagggttcttgcttaatttagatcaagtataaaatttgtatgacttcaagtctcattttatctgaaaggtttttttctcatttaatctgatgtggcattttcgtcatctgaagcatgagtgacaagttgggaatgatgtggtgatttagaatgcagtattggccaagtccaagttgtcaacttaagcgtctgtttaccaaagaccgggaacaggggcccaaacatgtccagtcctcttcttccctctgctggaacctttggggacactcaagggtacagtttgacactgatctggtccatgaggctgcccagagaaagcactgcttctgtatgtctcttgtggtattggaacaataaacccgtacaacctgc

SEQ ID NO: 275 - RNA, 495 nt, Homo sapiens
  source 1..495: mol_type = other RNA
tgggcagcggggtcccgcgtcccctcccccactatttggcagcgtctgggggtctggggcagcttcgttcattcacccgggggagttgggtttccgggaagggtcggaagctcctccctcgcttcctggtgggtaatggggtggtgcctttgactccgggggtggaaaagcgaccccacattcaaggacgccaatggcatgttgagctttcccaatctaaaccaggtattagaaaactactcggatgctccaatgacaccaaaacagattctgcaggtcatagaggcagaaggactaaaggaaatgagaagtgggacttcccctctcgcatgcctcaatgctatgctacattccaattcaagaggaggagaggggttgttttataaactgcctggccgaatcagccttttcacgctcaaggtgtgagccactgcaccaggccccttcatcttaattttaatatatctttgaataaacaccattgtatgaacctgc

SEQ ID NO: 276 - RNA, 812 nt, Homo sapiens
  source 1..812: mol_type = other RNA
cagactgggctgtttgccttcagaagctggactggaaattggtattttgaggagaactgaatccactttgcaaagaatgtatgttggacaaagacaaagtatctctgttgggagacgttgttcactgaggatttagcaagggagagcgtaacttgagtgtttgaagccgtctcgttcaaccgatgggggttgtgaattttgtgttcagagcgtcagaggacttgcaggtattagaaaactactcggatgctccaatgacaccaaaacagattctgcaggtcatagaggcagaaggactaaaggaaatgagaagtgggacttcccctctcgcatgcctcaatgctatgctacattccaattcaagaggaggagaggggttgttttataaactgcctggccgaatcagccttttcacgctcaaggtgtgagccactgcaccaggccccttcatcttaattttaatatatctttgaataaacaccattgtatgaacctgctgtaagcttgggagtggtctgttagtctacagcttgtgtctgagatgtgctaattgaatatttgctcagtacctcatcttaactgcctttggctttatgttgcttatccttcatagtatcttgttcattggccttttacatccataggcatcacttctctgatattcgttgtgctcttttaatggattaatggtttgcttggttggttcctctagttagactgtaaactccttgagagcagagtctgtattttattaattacccacagtactaggtacatagttgccttcaataaatatatatttaatgaacgaa

SEQ ID NO: 277 - RNA, 6591 nt, Homo sapiens
  source 1..6591: mol_type = other RNA
atgggggttgtgaattttgtgttcagagcgtcagaggacttgcaggtattagaaaactactcggatgctccaatgacaccaaaacagattctgcaggtcatagaggcagaaggactaaaggaaatgagtgggacttcccctctcgcatgcctcaatgctatgctacattccaattcaagaggaggagaggggttgttttataaactgcctggccgaatcagccttttcacgctcaagaaggatgccctgcagtggtctcgccatccagctacagtggagggagaggagccagaggacacggctgatgtggagagctgtgggtctaatgaagccagcactgtgagtggtgaaaacgatgtatctcttgatgaaacatcttcgaacgcatcctgttctacagaatctcagagtcgacctctttccaatcccagggacagctacagagcttcctcacaggcgaacaaacaaaagaaaaagactggggtgatgctgcctcgagttgtcctgactcctctgaaggtaaacggggcccacgtggaatctgcatcagggttctcgggctgccacgccgatggcgagagcggcagcccgtccagcagcagcagcggctctctggccctgggcagcgctgctattcgtggccaggccgaggtcacccaggaccctgccccgctcctgagaggcttccggaagccagccacaggtcaaatgaagcgcaacagaggggaagaaatagattttgagacacctgggtccattcttgtcaacaccaacctccgtgccctgatcaactctcggaccttccatgccttaccatcacacttccagcagcagctcctcttcctcctgcctgaagtagacagacaggtggggacggatggcctgttgcgtctcagcagcagtgcactaaataacgagttttttacccatgcggctcagagctggcgggagcgcctggctgatggtgaatttactcatgagatgcaagtcaggatacgacaggaaatggagaaggaaaagaaggtggaacaatggaaagaaaagttctttgaagactactatggacagaagctgggtttgaccaaagaagagtcattgcagcagaacgtgggccaggaggaggctgaaatcaaaagtggcttgtgtgtcccaggagaatcagtgcgtatacagcgtggtccagccacccgacagcgagatgggcattttaagaaacgctctcggccagatctccgaaccagagccagaaggaatctgtacaaaaaacaggagtcagaacaagcaggggttgctaaggatgcaaaatctgtggcctcagatgttcccctctacaaggatggggaggctaagactgacccagcagggctgagcagtccccatctgccaggcacatcctctgcagcacccgacctggagggtcccgaattcccagttgagtctgtggcttctcggatccaggctgagccagacaacttggcacgtgcctctgcatctccagacagaattcctagcctgcctcaggaaactgtggatcaggaacccaaggatcagaagaggaaatcctttgagcaggcggcctctgcatcctttcccgaaaagaagccccggcttgaagatcgtcagtcctttcgtaacacaattgaaagtgttcacaccgaaaagccacagcccactaaagaggagcccaaagtcccgcccatccggattcaactttcacgtatcaaaccaccctgggtggttaaaggtcagcccacttaccagatatgcccccggatcatccccaccacggagtcctcctgccggggttggactggcgccaggaccctcgcagacattaaagcccgtgctctgcaggtccgaggggcgagaggtcaccactgccatagagaggcggccaccactgccatcggaggggggggtggcccgggtggaggtggcggcggggccaccgatgagggaggtggcagaggcagcagcagtggtgatggtggtgaggcctgtggccaccctgagcccaggggaggcccgagcacccctggaaagtgtacgtcagatctacagcgaacacaactactgccgccttatcctctaaatggggagcatacccaggccggaactgccatgtccagagctaggagagaggacctgccttctctgagaaaggaggaaagctgcctactacagagggctacagttggactcacagatgggctaggagatgcctcccaactccccgttgctcccactggggaccagccatgccaggccttgcccctactgtcctcccaaacctcagtagctgagagattagtggagcagcctcagttgcatccggatgttagaactgaatgtgagtctggcaccacttcctgggaaagtgatgatgaggagcaaggacccaccgttcctgcagacaatggtcccattccgtctctagtgggagatgatacattagagaaaggaactggccaagctcttgacagtcatcccactatgaaggatcctgtaaatgtgacccccagttccacacctgaatcctcaccgactgattgcctgcagaacagagcatttgatgacgaattagggcttggtggctcatgccctcctatgagggaaagtgatactagacaagaaaacttgaaaaccaaggctctcgtttctaacagttctttgcattggatacccatcccatcgaatgatgaggtagtgaaacagcccaaaccagaatccagagaacacataccatctgttgagccccaggttggagaggagtgggagaaagctgctcccacccctcctgcattgcctggggatttgacagctgaggagggtctagatcctcttgacagccttacttcactctggactgtgccatctcgaggaggcagtgacagcaatggcagttactgtcaacaggtggacattgaaaagctgaaaatcaacggagactctgaagcactgagtcctcacggtgagtccacggatacagcctctgactttgaaggtcacctcacggaggacagcagtgaggctgacactagagaagctgcagtgacaaagggatcttcggtggacaaggatgagaaacccaattggaaccaatctgccccactgtccaaggtgaatggtgacatgcgtctggttacaaggacagatgggatggttgctcctcagagctgggtgtctcgagtatgtgcggtccgccaaaagatcccagattccctactgctggccagtactgagtaccagccaagagccgtgtgcctgtccatgcctgggtcctcagtggaggccactaacccacttgtgatgcagttgctgcagggtagcttgcccctagagaaggttcttccaccagcccacgatgacagcatgtcagaatccccacaagtaccacttacaaaagaccagagccatggctcgctacgcatgggatctttacatggtcttggaaaaaacagtggcatggttgatggaagcagccccagttctttaagggctttgaaggagcctcttctgccagatagctgtgaaacaggcactggtcttgccaggattgaggccacccaggctcctggagcaccccaaaagaattgcaaggcagtcccaagttttgactccctccatccagtgacaaatcccattacatcctctaggaaactggaagaaatggattccaaagagcagttctcttcctttagttgtgaagatcagaaggaagtccgtgctatgtcacaggacagtaattcaaatgctgctccaggaaagagcccaggagatcttactacctcgagaacacctcgtttctcatctccaaatgtgatctcctttggtccagagcagacaggtcgggccctgggtgatcagagcaatgttacaggccaagggaagaagctttttggctctgggaatgtggctgcaacccttcagcgccccaggcctgcggacccgatgcctcttcctgctgagatccctccagtttttcccagtgggaagttgggaccaagcacaaactccatgtctggtggggtacagactccaagggaagactgggctccaaagccacatgcctttgttggcagcgtcaagaatgagaagacttttgtggggggtcctcttaaggcaaatgccgagaacaggaaagctactgggcatagtcccctggaactggtgggtcacttggaagggatgccctttgtcatggacttgcccttctggaaattaccccgagagccagggaaggggctcagtgagcctctggagccttcttctctcccctcccaactcagcatcaagcaggcattttatgggaagctttctaaactccaactgagttccaccagctttaattattcctctagctctcccacctttcccaaaggccttgctggaagtgtggtgcagctgagccacaaagcaaactttggtgcgagccacagtgcatcactttccttgcaaatgttcactgacagcagcacggtggaaagcatctcgctccagtgtgcgtgcagcctgaaagccatgatcatgtgccaaggctgcggtgcgttctgtcacgatgactgtattggaccctcaaagctctgtgtattgtgccttgtggtgagataataaattatggccatgggaaacattgtatatttagtgtgtgtattttgataatgattgatcttaaatctgtatacagaatatcattgatataatactctttaggcaggagcactcttgccttcccccaaaatttacactgctaaagccctctgtcacttggcgacccttctggtcttgctggaggggtttcctgggtataacccattgggctgcccaaggccagccagcctgagctctcctgcaagacagagcctgatgtggcacggagtggggttgcggggggtggggggactgcctgactcccagagggacttgaaactgaagcaagaaggttgcattctccaccaagggagttaacctacctgaactaagtagaaatgccagtcttccactaccccctccctgccatcttttcttctgctactttggggagttgatggccaggaaagaagccagcacagggttaaagtaactcctggcattgcccaccagggggctggtgcacctgctgacctcagggtcacagttgagtcatttgccagttgacggagcaagtttgaccttggttctgttgctgaagcaaatttggaacttttctgtctcagtgtgatccactaacccacaggatcatttggaaccttgaatagctctgcttggacaatggggttggggaatagggttgtctttcctatgaaaatgccatctgtagaccttgtgagtcagccgtccagatgtttgcaggtgaattcctctgcttgacatcctccctgtcactttggaccctatgggagtgggcatctccacgcacctgtgtatgtgaaagtcattttacatttcaaagcagtgtgtgtttcttatttttatatttttaactctttattcttggatgtataaagtgaactttttggcttctgtaagtatgctctatgcacctctaatgttttatcatgtatttatatgttgtacacagtactggctgattctgtaaatggatgtattgtacagagaacatgaacgtctcttcctaattttacatcttcagcatcattgcattaaagtggtgtaatctccttctctacatctgttgtcagagccactgagtgctgtgctgctcgacgtgagggtgaaatgattgacttgtgacctgccaggttgcccgatgccctgttgggtcaccggctggacctgctgcagcctgcagagccacagtcagcctgcccacatgccaccgagcaaacgcatcttgcttttcacatctctcctcctacagccttaatggctgcttgctgccatatgtgacaaatcaccaccaccagtgttaagtgcttctggattcatgggtgagttccctgggcagcccccaggaaggccttccagatctggctccagggtcaccacctgtcacagcaatacctgggaccatgctctcctgggactgtgaggctccttttgacgtacttttgacatcaggcaggtttgggaagaaacaaagccatgcctgctcctgcctctctcccaacatgtttccagcaagtagatgcccctgtgtgtgttttcccttgccttgtttcctgccttatatcttgtatttcgacttattacagagttgagggttcttgcttaatttagatcaagtataaaatttgtatgacttcaagtctcattttatctgaaaggtttttttctcatttaatctgatgtggcattttcgtcatctgaagcatgagtgacaagttgggaatgatgtggtgatttagaatgcagtattggccaagtccaagttgtcaacttaagcgtctgtttaccaaagaccgggaacaggggcccaaacatgtccagtcctcttcttccctctgctggaacctttggggacactcaagggtacagtttgacactgatctggtccatgaggctgcccagagaaagcactgcttctgtatgtctcttgtggtattggaacaataaacccgtacaacctgc

SEQ ID NO: 278 - RNA, 1084 nt, Homo sapiens
  source 1..1084: mol_type = other RNA
cacacccacggcagacacgcacgcacccgggcgccgaagggaaagccgcgtctcgccctcccgccccgccgtcggtcctgtctcagtccctcagcagagcgggaaagcggaggccggagccgtgacctctgaccccgtggttatgcggagccgccgcattccttagcgatcgcggggcagccgccgctgccgccgtgggcgactgacgcagcgcgggcgcgtggagccgccgccgcccctcccccaccgccgctctcgcgccagccggtccccgcgtgcccgccccttctccccggccgcacccgagacctcgcgcgccgccgctgccacgcgccccccccaccgccgccgccgccccagccccgcgccaccgccccagcccgcccagcccggaggtcccgcgtggagctgccgccgccgccggggagaaggatgaaggacaaacagaagaagaagaaggagcgcacgtgggccgaggccgcgcgcctggtattagaaaactactcggatgctccaatgacaccaaaacagattctgcaggtcatagaggcagaaggactaaaggaaatgagaagtgggacttcccctctcgcatgcctcaatgctatgctacattccaattcaagaggaggagaggggttgttttataaactgcctggccgaatcagccttttcacgctcaaggtgtgagccactgcaccaggccccttcatcttaattttaatatatctttgaataaacaccattgtatgaacctgctgtaagcttgggagtggtctgttagtctacagcttgtgtctgagatgtgctaattgaatatttgctcagtacctcatcttaactgcctttggctttatgttgcttatccttcatagtatcttgttcattggccttttacatccataggcatcacttctctgatattcgttgtgctcttttaatggattaatggtttgcttggttggttcctctagttagactgtaaactccttgagagcagagtctgtattttattaattacccacagtactaggtacatagttgccttcaataaatatatatttaatgaaaaaaaaaaaaaaaa

SEQ ID NO: 279 - RNA, 1078 nt, Homo sapiens
  source 1..1078: mol_type = other RNA
cacggcagacacgcacgcacccgggcgccgaagggaaagccgcgtctcgccctcccgccccgccgtcggtcctgtctcagtccctcagcagagcgggaaagcggaggccggagccgtgacctctgaccccgtggttatgcggagccgccgcattccttagcgatcgcggggcagccgccgctgccgccgtgggcgactgacgcagcgcgggcgcgtggagccgccgccgcccctcccccaccgccgctctcgcgccagccggtccccgcgtgcccgccccttctccccggccgcacccgagacctcgcgcgccgccgctgccacgcgccccccccaccgccgccgccgccccagccccgcgccaccgccccagcccgcccagcccggaggtcccgcgtggagctgccgccgccgccggggagaaggatgaaggacaaacagaagaagaagaaggagcgcacgtgggccgaggccgcgcgcctggtattagaaaactactcggatgctccaatgacaccaaaacagattctgcaggtcatagaggcagaaggactaaaggaaatgagaagtgggacttcccctctcgcatgcctcaatgctatgctacattccaattcaagaggaggagaggggttgttttataaactgcctggccgaatcagccttttcacgctcaaggtgtgagccactgcaccaggccccttcatcttaattttaatatatctttgaataaacaccattgtatgaacctgctgtaagcttgggagtggtctgttagtctacagcttgtgtctgagatgtgctaattgaatatttgctcagtacctcatcttaactgcctttggctttatgttgcttatccttcatagtatcttgttcattggccttttacatccataggcatcacttctctgatattcgttgtgctcttttaatggattaatggtttgcttggttggttcctctagttagactgtaaactccttgagagcagagtctgtattttattaattacccacagtactaggtacatagttgccttcaataaatatatatttaatgaaaaaaaaaaaaaaaa

SEQ ID NO: 280 - RNA, 1009 nt, Homo sapiens
  source 1..1009: mol_type = other RNA
cacgcacgcacccgggcgccgaagggaaagccgcgtctcgccctcccgccccgccgtcggtcctgtctcagtccctcagcagagcgggaaagcggaggccggagccgtgacctctgaccccgtggttatgcggagccgccgcattccttagcgatcgcggggcagccgccgctgccgccgtgggcgactgacgcagcgcgggcgcgtggagccgccgccgcccctcccccaccgccgctctcgcgccagccggtccccgcgtgcccgccccttctccccggccgcacccgagacctcgcgcgccgccgctgccacgcgccccccccaccgccgccgccgccccagccccgcgccaccgccccagcccgcccagcccggaggtcccgcgtggagctgccgccgccgccggggagaaggatgaaggacaaacagaagaagaagaaggagcgcacgtgggccgaggccgcgcgcctggtattagaaaactactcggatgctccaatgacaccaaaacagattctgcaggtcatagaggcagaaggactaaaggaaatgagtgggacttcccctctcgcatgcctcaatgctatgctacattccaattcaagaggaggagaggggttgttttataaactgcctggccgaatcagccttttcacgctcaagagatgaagtcttgctatgttggttaaactggtctcgaactcctggcctcaggtgatcttcccaccacagcttcacaaagcactgggatggattacagaaggatgccctgcagtggtctcgccatccagctacagtggagggagaggagccagaggacacggctgatgtggagagctgtgggtctaatgaagccagcactgtgagtggtgaaaacgatgtatctcttgatgaaacatcttcgaacgcatcctgttctacagaatctcagagtcgacctctttccaatcccagggacagctacagagcttcctcacaggcgaacaaaaaaaaaaaaaaaaaaaaa

SEQ ID NO: 281 - RNA, 6864 nt, Homo sapiens
  source 1..6864: mol_type = other RNA
gggcagccgccgctgccgccgtgggcgactgacgcagcgcgggcgcgtggagccgccgccgcccctcccccaccgccgctctcgcgccagccggtccccgcgtgcccgccccttctccccggccgcacccgagacctcgcgcgccgccgctgccacgcgccccccccaccgccgccgccgccccagccccgcgccaccgccccagcccgcccagcccggaggtcccgcgtggagctgccgccgccgccggggagaaggatgaaggacaaacagaagaagaagaaggagcgcacgtgggccgaggccgcgcgcctggtattagaaaactactcggatgctccaatgacaccaaaacagattctgcaggtcatagaggcagaaggactaaaggaaatgagaagtgggacttcccctctcgcatgcctcaatgctatgctacattccaattcaagaggaggagaggggttgttttataaactgcctggccgaatcagccttttcacgctcaagaaggatgccctgcagtggtctcgccatccagctacagtggagggagaggagccagaggacacggctgatgtggagagctgtgggtctaatgaagccagcactgtgagtggtgaaaacgatgtatctcttgatgaaacatcttcgaacgcatcctgttctacagaatctcagagtcgacctctttccaatcccagggacagctacagagcttcctcacaggcgaacaaacaaaagaaaaagactggggtgatgctgcctcgagttgtcctgactcctctgaaggtaaacggggcccacgtggaatctgcatcagggttctcgggctgccacgccgatggcgagagcggcagcccgtccagcagcagcagcggctctctggccctgggcagcgctgctattcgtggccaggccgaggtcacccaggaccctgccccgctcctgagaggcttccggaagccagccacaggtcaaatgaagcgcaacagaggggaagaaatagattttgagacacctgggtccattcttgtcaacaccaacctccgtgccctgatcaactctcggaccttccatgccttaccatcacacttccagcagcagctcctcttcctcctgcctgaagtagacagacaggtggggacggatggcctgttgcgtctcagcagcagtgcactaaataacgagttttttacccatgcggctcagagctggcgggagcgcctggctgatggtgaatttactcatgagatgcaagtcaggatacgacaggaaatggagaaggaaaagaaggtggaacaatggaaagaaaagttctttgaagactactatggacagaagctgggtttgaccaaagaagagtcattgcagcagaacgtgggccaggaggaggctgaaatcaaaagtggcttgtgtgtcccaggagaatcagtgcgtatacagcgtggtccagccacccgacagcgagatgggcattttaagaaacgctctcggccagatctccgaaccagagccagaaggaatctgtacaaaaaacaggagtcagaacaagcaggggttgctaaggatgcaaaatctgtggcctcagatgttcccctctacaaggatggggagactaagactgacccagcagggctgagcagtccccatctgccaggcacatcctctgcagcacccgacctggagggtcccgaattcccagttgagtctgtggcttctcggatccaggctgagccagacaacttggcacgtgcctctgcatctccagacagaattcctagcctgcctcaggaaactgtggatcaggaacccaaggatcagaagaggaaatcctttgagcaggcggcctctgcatcctttcccgaaaagaagccccggcttgaagatcgtcagtcctttcgtaacacaattgaaagtgttcacaccgaaaagccacagcccactaaagaggagcccaaagtcccgcccatccggattcaactttcacgtatcaaaccaccctgggtggttaaaggtcagcccacttaccagatatgcccccggatcatccccaccacggagtcctcctgccggggttggactggcgccaggaccctcgcagacattaaagcccgtgctctgcaggtccgaggggcgagaggtcaccactgccatagagaggcggccaccactgccatcggaggggggggtggcccgggtggaggtggcggcggggccaccgatgagggaggtggcagaggcagcagcagtggtgatggtggtgaggcctgtggccaccctgagcccaggggaggcccgagcacccctggaaagtgtacgtcagatctacagcgaacacaactactgccgccttatcctctaaatggggagcatacccaggccggaactgccatgtccagagctaggagagaggacctgccttctctgagaaaggaggaaagctgcctactacagagggctacagttggactcacagatgggctaggagatgcctcccaactccccgttgctcccactggggaccagccatgccaggccttgcccctactgtcctcccaaacctcagtagctgagagattagtggagcagcctcagttgcatccggatgttagaactgaatgtgagtctggcaccacttcctgggaaagtgatgatgaggagcaaggacccaccgttcctgcagacaatggtcccattccgtctctagtgggagatgatacattagagaaaggaactggccaagctcttgacagtcatcccactatgaaggatcctgtaaatgtgacccccagttccacacctgaatcctcaccgactgattgcctgcagaacagagcatttgatgacgaattagggcttggtggctcatgccctcctatgagggaaagtgatactagacaagaaaacttgaaaaccaaggctctcgtttctaacagttctttgcattggatacccatcccatcgaatgatgaggtagtgaaacagcccaaaccagaatccagagaacacataccatctgttgagccccaggttggagaggagtgggagaaagctgctcccacccctcctgcattgcctggggatttgacagctgaggagggtctagatcctcttgacagccttacttcactctggactgtgccatctcgaggaggcagtgacagcaatggcagttactgtcaacaggtggacattgaaaagctgaaaatcaacggagactctgaagcactgagtcctcacggtgagtccacggatacagcctctgactttgaaggtcacctcacggaggacagcagtgaggctgacactagagaagctgcagtgacaaagggatcttcggtggacaaggatgagaaacccaattggaaccaatctgccccactgtccaaggtgaatggtgacatgcgtctggttacaaggacagatgggatggttgctcctcagagctgggtgtctcgagtatgtgcggtccgccaaaagatcccagattccctactgctggccagtactgagtaccagccaagagccgtgtgcctgtccatgcctgggtcctcagtggaggccactaacccacttgtgatgcagttgctgcagggtagcttgcccctagagaaggttcttccaccagcccacgatgacagcatgtcagaatccccacaagtaccacttacaaaagaccagagccatggctcgctacgcatgggatctttacatggtcttggaaaaaacagtggcatggttgatggaagcagccccagttctttaagggctttgaaggagcctcttctgccagatagctgtgaaacaggcactggtcttgccaggattgaggccacccaggctcctggagcaccccaaaagaattgcaaggcagtcccaagttttgactccctccatccagtgacaaatcccattacatcctctaggaaactggaagaaatggattccaaagagcagttctcttcctttagttgtgaagatcagaaggaagtccgtgctatgtcacaggacagcaattcaaatgctgctccaggaaagagcccaggagatcttactacctcgagaacacctcgtttctcatctccaaatgtgatctcctttggtccagagcagacaggtcgggccctgggtgatcagagcaatgttacaggccaagggaagaagctttttggctctgggaatgtggctgcaacccttcagcgccccaggcctgcggacccgatgcctcttcctgctgagatccctccagtttttcccagtgggaagttgggaccaagcacaaactccatgtctggtggggtacagactccaagggaagactgggctccaaagccacatgcctttgttggcagcgtcaagaatgagaagacttttgtggggggtcctcttaaggcaaatgccgagaacaggaaagctactgggcatagtcccctggaactggtgggtcacttggaagggatgccctttgtcatggacttgcccttctggaaattaccccgagagccagggaaggggctcagtgagcctctggagccttcttctctcccctcccaactcagcatcaagcaggcattttatgggaagctttctaaactccaactgagttccaccagctttaattattcctctagctctcccacctttcccaaaggccttgctggaagtgtggtgcagctgagccacaaagcaaactttggtgcgagccacagtgcatcactttccttgcaaatgttcactgacagcagcacggtggaaagcatctcgctccagtgtgcgtgcagcctgaaagccatgatcatgtgccaaggctgcggtgcgttctgtcacgatgactgtattggaccctcaaagctctgtgtattgtgccttgtggtgagataataaattatggccatgggaaacgttgtatatttagtgtgtgtattttgataatgattgatcttaaatctgtatacagaatatcattgatacaatactctttaggcaggagcactcttgccttcccccaaaatttacactgctaaagccctctgtcacttggcgacccttctggtcttgctggaggggtttcctgggtataacccattgggctgcccaaggccagccagcctgagctctcctgcaagacagagcctgatgtggcacggagtggggttgcggggggtggggggactgcctgactcccagagggacttgaaactgaagcaagaaggttgcattctccaccaagggagttaacctacctgaactaagtagaaatgccagtcttccactaccccctccctgccatcttttcttctgctactttggggagttgatggccaggaaagaagccagcacagggttaaagtaactcctggcattgcccaccagggggctggtgcacctgctgacctcagggtcacagttgagtcatttgccagttgacggagcaagtttgaccttggttctgttgctgaagcaaatttggaacttttctgtctcagtgtgatccactaacccacaggatcatttggaaccttgaatagctctgcttggacaatggggttggggaatagggttgtctttcctatgaaaatgccatctgtagaccttgtgagtcagccgtccagatgtttgcaggtgaattcctctgcttgacatcctccctgtcactttggaccctatgggagtgggcatctccacgcacctgtgtatgtgaaagtcattttacatttcaaagcagtgtgtgtttcttatttttatatttttaactctttattcttggatgtataaagtgaactttttggcttctgtaagtatgctctatgcacctctaatgttttatcatgtatttatatgttgtacacagtactggctgattctgtaaatggatgtattgtacagagaacatgaacgtctcttcctaattttacatcttcagcatcattgcattaaagtggtgtaatctccttctctacatctgttgtcagagccactgagtgctgtgctgctcgacgtgagggtgaaatgattgacttgtgacctgccaggttgcccgatgccctgttgggtcaccggctggacctgctgcagcctgcagagccacagtcagcctgcccacatgccaccgagcaaacgcatcttgcttttcacatctctcctcctacagccttaatggctgcttgctgccatatgtgacaaatcaccaccaccagtgttaagtgcttctggattcatgggtgagttccctgggcagcccccaggaaggccttccagatctggctccagggtcaccacctgtcacagcaatacctgggaccatgctctcctgggactgtgaggctccttttgacgtacttttgacatcaggcaggtttgggaagaaacaaagccatgcctgctcctgcctctctcccaacatgtttccagcaagtagatgcccctgtgtgtgttttcccttgccttgtttcctgccttatatcttgtatttcgacttattacagagttgagggttcttgcttaatttagatcaagtataaaatttgtatgacttcaagtctcattttatctgaaaggtttttttctcatttaatctgatgtggcattttcgtcatctgaagcatgagtgacaagttgggaatgatgtggtgatttagaatgcagtattggccaagtccaagttgtcaacttaagcgtctgtttaccaaagaccgggaacaggggcccaaacatgtccagtcctcttcttccctctgctggaacctttggggacactcaagggtacagtttgacactgatctggtccatgaggctgcccagagaaagcactgcttctgtatgtctcttgtggtattggaacaataaacccgtacaacctgc

SEQ ID NO: 282 - RNA, 4658 nt, Homo sapiens
  source 1..4658: mol_type = other RNA
aaattccggcggaggggcgagctggcaggccggctcctcccactctgggcagcggggtcccgcgtcccctcccccactatttggcagcgtctgggggtctggggcagcttcgttcattcacccgggggagttgggtttccgggaagggtcggaagctcctccctcgcttcctggtgggtaatggggtggtgcctttgactccgggggtggaaaagcgaccccacattcaaggacgccaatggcatgttgagctttcccaatctaaaccaggtattagaaaactactcggatgctccaatgacaccaaaacagattctgcaggtcatagaggcagaaggactaaaggaaatgagaagtgggacttcccctctcgcatgcctcaatgctatgctacattccaattcaagaggaggagaggggttgttttataaactgcctggccgaatcagccttttcacgctcaagaaggatgccctgcagtggtctcgccatccagctacagtggagggagaggagccagaggacacggctgatgtggagagctgtgggtctaatgaagccagcactgtgagtggtgaaaacgatgtatctcttgatgaaacatcttcgaacgcatcctgttctacagaatctcagagtcgacctctttccaatcccagggacagctacagagcttcctcacaggcgaacaaacaaaagaaaaagactggggtgatgctgcctcgagttgtcctgactcctctgaaggtaaacggggcccacgtggaatctgcatcaggtcaaatgaagcgcaacagaggggaagaaatagattttgagacacctgggtccattcttgtcaacaccaacctccgtgccctgatcaactctcggaccttccatgccttaccatcacacttccagcagcagctcctcttcctcctgcctgaagtagacagacaggtggggacggatggcctgttgcgtctcagcagcagtgcactaaataacgagttttttacccatgcggctcagagctggcgggagcgcctggctgatggtgaatttactcatgagatgcaagtcaggatacgacaggaaatggagaaggaaaagaaggtggaacaatggaaagaaaagttctttgaagactactatggacagaagctgggtttgaccaaagaagagtcattgcagcagaacgtgggccaggaggaggctgaaatcaaaagtggcttgtgtgtcccaggagaatcagtgcgtatacagcgtggtccagccacccgacagcgagatgggcattttaagaaacgctctcggccagatctccgaaccagagccagaaggaatctgtacaaaaaacaggagtcagaacaagcaggggttgctaaggatgcaaaatctgtggcctcagatgttcccctctacaaggatggggaggctaagactgacccagcagggctgagcagtccccatctgccaggcacatcctctgcagcacccgacctggagggtcccgaattcccagttgagtctgtggcttctcggatccaggctgagccagacaacttggcacgtgcctctgcatctccagacagaattcctagcctgcctcaggaaactgtggatcaggaacccaaggatcagaagaggaaatcctttgagcaggcggcctctgcatcctttcccgaaaagaagccccggcttgaagatcgtcagtcctttcgtaacacaattgaaagtgttcacaccgaaaagccacagcccactaaggaggagcccaaagtcccgcccatccggattcaactttcacgtatcaaaccaccctgggtggttaaaggtcagcccacttaccagatatgcccccggatcatccccaccacggagtcctcctgccggggttggactggcgccaggaccctcgcagacattaaagcccgtgctctgcaggtccgaggggcgagaggtcaccactgccatagagaggccaccgatgagggaggtggcagaggcagcagcagtggtgatggtggtgaggcctgtggccaccctgagcccaggggaggcccgagcacccctggaaagtgtacgtcagatctacagcgaacacaactactgccgccttatcctctaaatggggagcatacccaggccggaactgccatgtccagagctaggagagaggacctgccttctctgagaaaggaggaaagctgcctactacagagggctacagttggactcacagatgggctaggagatgcctcccaactccccgttgctcccactggggaccagccatgccaggccttgcccctactgtcctcccaaacctcagtagctgagagattagtggagcagcctcagttgcatccggatgttagaactgaatgtgagtctggcaccacttcctgggaaagtgatgatgaggagcaaggacccaccgttcctgcagacaatggtcccattccgtctctagtgggagatgatacattagagaaagaaactggccaagctcttgtcagtcatcccactatgagggatcctgtaaatgtgacccccagttccacacctgaatcctcaccgactgattgcctgcagaacagagcatttgatgacgaattagggcttggtggctcatgccctcctatgagggaaagtgatactagacaagaaaacttgaaaaccaaggctctcgtttctaacagttctttgcattggatacccatcccatcgaatgatgaggtagtgaaacagcccaaaccagaatccagagaacacataccatctgttgagccccaggttggagaggagtgggagaaagctgctcccacccctcctgcattgcctggggatttgacagctgaggagggtctagatcctcttgacagccttacttcactctggactgtgccatctcgaggaggcagtgacagcaatggcagttactgtcaacaggtggacattgaaaagctgaaaatcaacggagactctgaagcactgagtcctcacggtgagtccacggatacagcctctgactttgaaggtcacctcacggaggacagcagtgaggctgacactagagaagctgcagtgacaaagggatcttcggtggacaaggatgagaaacccaattggaaccaatctgccccactgtccaaggtgaatggtgacatgcgtctggttacaaggacagatgggatggttgctcctcagagctgggtgtctcgagtatgtgcggtccgccaaaagatcccagattccctactgctggccagtactgagtaccagccaagagccgtgtgcctgtccatgcctgggtcctcagtggaggccactaacccacttgtgatgcagttgctgcagggtagcttgcccctagagaaggttcttccaccagcccacgatgacagcatgtcagaatccccacaagtaccacttacaaaagaccagagccatggctcgctacgcatgggatctttacatggtcttggaaaaaacagtggcatggttgatggaagcagccccagttctttaagggctttgaaggagcctcttctgccagatagctgtgaaacaggcactggtcttgccaggattgaggccacccaggctcctggagcaccccaaaagaattgcaaggcagtcccaagttttgactccctccatccagtgacaaatcccattacatcctctaggaaactggaagaaatggattccaaagagcagttctcttcctttagttgtgaagatcagaaggaagtccgtgctatgtcacaggacagtaattcaaatgctgctccaggaaagagcccaggagatcttactacctcgagaacacctcgtttctcatctccaaatgtgatctcctttggtccagagcagacaggtcgggccctgggtgatcagagcaatgttacaggccaagggaagaagctttttggctctgggaatgtggctgcaacccttcagcgccccaggcctgcggacccgatgcctcttcctgctgagatccctccagtttttcccagtgggaagttgggaccaagcacaaactccatgtctggtggggtacagactccaagggaagactgggctccaaagccacatgcctttgttggcagcgtcaagaatgagaagacttttgtggggggtcctcttaaggcaaatgccgagaacaggaaagctactgggcatagtcccctggaactggtgggtcacttggaagggatgccctttgtcatggacttgcccttctggaaattaccccgagagccagggaaggggctcagtgagcctctggagccttcttctctcccctcccaactcagcatcaagcaggcattttatgggaagctttctaaactccaactgagttccaccagctttaattattcctctagctctcccacctttcccaaaggccttgctggaagtgtggtgcagctgagccacaaagcaaactttggtgcgagccacagtgcatcactttccttgcaaatgttcactgacagcagcacggtggaaagcatctcgctccagtgtgcgtgcagcctgaaagccatgatcatgtgccaaggctgcggtgcgttctgtcacgatgactgtattggaccctcaaagctctgtgtattgtgccttgtggtgagataataaattatggccatgggaaacattgt

SEQ ID NO: 283 - RNA, 6088 nt, Homo sapiens
  source 1..6088: mol_type = other RNA
cctgactcctctgaaggtaaacggggcccacgtggaatctgcatcagggttctcgggctgccacgccgatggcgagagcggcagcccgtccagcagcagcagcggctctctggccctgggcagcgctgctattcgtggccaggccgaggtcacccaggaccctgccccgctcctgagaggcttccggaagccagccacaggtcaaatgaagcgcaacagaggggaagaaatagattttgagacacctgggtccattcttgtcaacaccaacctccgtgccctgatcaactctcggaccttccatgccttaccatcacacttccagcagcagctcctcttcctcctgcctgaagtagacagacaggtggggacggatggcctgttgcgtctcagcagcagtgcactaaataacgagttttttacccatgcggctcagagctggcgggagcgcctggctgatggtgaatttactcatgagatgcaagtcaggatacgacaggaaatggagaaggaaaagaaggtggaacaatggaaagaaaagttctttgaagactactatggacagaagctgggtttgaccaaagaagagtcattgcagcagaacgtgggccaggaggaggctgaaatcaaaagtggcttgtgtgtcccaggagaatcagtgcgtatacagcgtggtccagccacccgacagcgagatgggcattttaagaaacgctctcggccagatctccgaaccagagccagaaggaatctgtacaaaaaacaggagtcagaacaagcaggggttgctaaggatgcaaaatctgtggcctcagatgttcccctctacaaggatggggaggctaagactgacccagcagggctgagcagtccccatctgccaggcacatcctctgcagcacccgacctggagggtcccgaattcccagttgagtctgtggcttctcggatccaggctgagccagacaacttggcacgtgcctctgcatctccagacagaattcctagcctgcctcaggaaactgtggatcaggaacccaaggatcagaagaggaaatcctttgagcaggcggcctctgcatcctttcccgaaaagaagccccggcttgaagatcgtcagtcctttcgtaacacaattgaaagtgttcacaccgaaaagccacagcccactaaagaggagcccaaagtcccgcccatccggattcaactttcacgtatcaaaccaccctgggtggttaaaggtcagcccacttaccagatatgcccccggatcatccccaccacggagtcctcctgccggggttggactggcgccaggaccctcgcagacattaaagcccgtgctctgcaggtccgaggggcgagaggtcaccactgccatagagaggcggccaccactgccatcggaggggggggtggcccgggtggaggtggcggcggggccaccgatgagggaggtggcagaggcagcagcagtggtgatggtggtgaggcctgtggccaccctgagcccaggggaggcccgagcacccctggaaagtgtacgtcagatctacagcgaacacaactactgccgccttatcctctaaatggggagcatacccaggccggaactgccatgtccagagctaggagagaggacctgccttctctgagaaaggaggaaagctgcctactacagagggctacagttggactcacagatgggctaggagatgcctcccaactccccgttgctcccactggggaccagccatgccaggccttgcccctactgtcctcccaaacctcagtagctgagagattagtggagcagcctcagttgcatccggatgttagaactgaatgtgagtctggcaccacttcctgggaaagtgatgatgaggagcaaggacccaccgttcctgcagacaatggtcccattccgtctctagtgggagatgatacattagagaaaggaactggccaagctcttgacagtcatcccactatgaaggatcctgtaaatgtgacccccagttccacacctgaatcctcaccgactgattgcctgcagaacagagcatttgatgacgaattagggcttggtggctcatgccctcctatgagggaaagtgatactagacaagaaaacttgaaaaccaaggctctcgtttctaacagttctttgcattggatacccatcccatcgaatgatgaggtagtgaaacagcccaaaccagaatccagagaacacataccatctgttgagccccaggttggagaggagtgggagaaagctgctcccacccctcctgcattgcctggggatttgacagctgaggagggtctagatcctcttgacagccttacttcactctggactgtgccatctcgaggaggcagtgacagcaatggcagttactgtcaacaggtggacattgaaaagctgaaaatcaacggagactctgaagcactgagtcctcacggtgagtccacggatacagcctctgactttgaaggtcacctcacggaggacagcagtgaggctgacactagagaagctgcagtgacaaagggatcttcggtggacaaggatgagaaacccaattggaaccaatctgccccactgtccaaggtgaatggtgacatgcgtctggttacaaggacagatgggatggttgctcctcagagctgggtgtctcgagtatgtgcggtccgccaaaagatcccagattccctactgctggccagtactgagtaccagccaagagccgtgtgcctgtccatgcctgggtcctcagtggaggccactaacccacttgtgatgcagttgctgcagggtagcttgcccctagagaaggttcttccaccagcccacgatgacagcatgtcagaatccccacaagtaccacttacaaaagaccagagccatggctcgctacgcatgggatctttacatggtcttggaaaaaacagtggcatggttgatggaagcagccccagttctttaagggctttgaaggagcctcttctgccagatagctgtgaaacaggcactggtcttgccaggattgaggccacccaggctcctggagcaccccaaaagaattgcaaggcagtcccaagttttgactccctccatccagtgacaaatcccattacatcctctaggaaactggaagaaatggattccaaagagcagttctcttcctttagttgtgaagatcagaaggaagtccgtgctatgtcacaggacagcaattcaaatgctgctccaggaaagagcccaggagatcttactacctcgagaacacctcgtttctcatctccaaatgtgatctcctttggtccagagcagacaggtcgggccctgggtgatcagagcaatgttacaggccaagggaagaagctttttggctctgggaatgtggctgcaacccttcagcgccccaggcctgcggacccgatgcctcttcctgctgagatccctccagtttttcccagtgggaagttgggaccaagcacaaactccatgtctggtggggtacagactccaagggaagactgggctccaaagccacatgcctttgttggcagcgtcaagaatgagaagacttttgtggggggtcctcttaaggcaaatgccgagaacaggaaagctactgggcatagtcccctggaactggtgggtcacttggaagggatgccctttgtcatggacttgcccttctggaaattaccccgagagccagggaaggggctcagtgagcctctggagccttcttctctcccctcccaactcagcatcaagcaggcattttatgggaagctttctaaactccaactgagttccaccagctttaattattcctctagctctcccacctttcccaaaggccttgctggaagtgtggtgcagctgagccacaaagcaaactttggtgcgagccacagtgcatcactttccttgcaaatgttcactgacagcagcacggtggaaagcatctcgctccagtgtgcgtgcagcctgaaagccatgatcatgtgccaaggctgcggtgcgttctgtcacgatgactgtattggaccctcaaagctctgtgtattgtgccttgtggtgagataataaattatggccatgggaaacgttgtatatttagtgtgtgtattttgataatgattgatcttaaatctgtatacagaatatcattgatacaatactctttaggcaggagcactcttgccttcccccaaaatttacactgctaaagccctctgtcacttggcgacccttctggtcttgctggaggggtttcctgggtataacccattgggctgcccaaggccagccagcctgagctctcctgcaagacagagcctgatgtggcacggagtggggttgcggggggtggggggactgcctgactcccagagggacttgaaactgaagcaagaaggttgcattctccaccaagggagttaacctacctgaactaagtagaaatgccagtcttccactgccccctccctgccatcttttcttctgctactttggggagttgatggccaggaaagaagccagcacagggttaaagtaactcctggcattgcccaccagggggctggtgcacctgctgacctcagggtcacagttgagtcatttgccagttgaccgagcaagtttgaccttggttctgttgctgaagcaaatttggaacttttctgtctcagtgtgatccactaacccacaggatcatttggaaccttgaatagctctgcttggacaatggggttggggaatagggttgtctttcctatgaaaatgccatctgtagaccttgtgagtcagccgtccagatgtttgcaggtgaattcctctgcttgacatcctccctgtcactttggaccctatgggagtgggcatctccacgcacctgtgtatgtgaaagtcattttacatttcaaagcagtgtgtgtttcttatttttatatttttaactctttattcttggatgtataaagtgaactttttggcttctgtaagtatgctctatgcacctctaatgttttatcatgtatttatatgttgtacacagtactggctgattctgtaaatggatgtattgtacagagaacatgaacgtctcttcctaattttacatcttcagcatcattgcattaaagtggtgtaatctccttctctacatctgttgtcagagccactgagtgctgtgctgctcgacgtgagggtgaaatgattgacttgtgacctgccaggttgcccgatgccctgttgggtcaccggctggacctgctgcagcctgcagagccacagtcagcctgcccacatgccaccgagcaaacgcatcttgcttttcacatctctcctcctacagccttaatggctgcttgctgccatatgtgacaaatcaccaccaccagtgttaagtgcttctggattcatgggtgagttccctgggcagcccccaggaaggccttccagatctggctccagggtcaccacctgtcacagcaatacctgggaccatgctctcctgggactgtgaggctccttttgacgtacttttgacatcaggcaggtttgggaagaaacaaagccatgcctgctcctgcctctctcccaacatgtttccagcaagtagatgcccctgtgtgtgttttcccttgccttgtttcctgccttatatcttgtatttcgacttattacagagttgagggttcttgcttaatttagatcaagtataaaatttgtatgacttcaagtctcattttatctgaaaggtttttttctcatttaatctgatgtggcattttcgtcatctgaagcatgagtgacaagttgggaatgatgtggtgatttagaatgcagtattggccaagtccaagttgtcaacttaagcgtctgtttaccaaagaccgggaacaggggcccaaacatgtccagtcctcttcttccctctgctggaacctttggggacactcaagggtacagtttgacactgatctggtccatgaggctgcccagagaaagcactgcttctgtatgtctcttgtggtattggaacaataaacccgtacaacctgc

SEQ ID NO: 284 - RNA, 4055 nt, Homo sapiens
  source 1..4055: mol_type = other RNA
gcagcccgtccagcagcagcagcggctctctggccctgggcagcgctgctattcgtggccaggccgaggtcacccaggaccctgccccgctcctgagaggcttccggaagccagccacaggtcaaatgaagcgcaacagaggggaagaaatagattttgagacacctgggtccattcttgtcaacaccaacctccgtgccctgatcaactctcggaccttccatgccttaccatcacacttccagcagcagctcctcttcctcctgcctgaagtagacagacaggtggggacggatggcctgttgcgtctcagcagcagtgcactaaataacgagttttttacccatgcggctcagagctggcgggagcgcctggctgatggtgaatttactcatgagatgcaagtcaggatacgacaggaaatggagaaggaaaagaaggtggaacaatggaaagaaaagttctttgaagactactatggacagaagctgggtttgaccaaagaagagtcattgcagcagaacgtgggccaggaggaggctgaaatcaaaagtggcttgtgtgtcccaggagaatcagtgcgtatacagcgtggtccagccacccgacagcgagatgggcattttaagaaacgctctcggccagatctccgaaccagagccagaaggaatctgtacaaaaaacaggagtcagaacaagcaggggttgctaaggatgcaaaatctgtggcctcagatgttcccctctacaaggatggggaggctaagactgacccagcagggctgagcagtccccatctgccaggcacatcctctgcagcacccgacctggagggtcccgaattcccagttgagtctgtggcttctcggatccaggctgagccagacaacttggcacgtgcctctgcatctccagacagaattcctagcctgcctcaggaaactgtggatcaggaacccaaggatcagaagaggaaatcctttgagcaggcggcctctgcatcctttcccgaaaagaagccccggcttgaagatcgtcagtcctttcgtaacacaattgaaagtgttcacaccgaaaagccacagcccactaaagaggagcccaaagtcccgcccatccggattcaactttcacgtatcaaaccaccctgggtggttaaaggtcagcccacttaccagatatgcccccggatcatccccaccacggagtcctcctgccggggttggactggcgccaggaccctcgcagacattaaagcccgtgctctgcaggtccgaggggcgagaggtcaccactgccatagagaggcggccaccactgccatcggaggggggggtggcccgggtggaggtggcggcggggccaccgatgagggaggtggcagaggcagcagcagtggtgatggtggtgaggcctgtggccaccctgagcccaggggaggcccgagcacccctggaaagtgtacgtcagatctacagcgaacacaactactgccgccttatcctctaaatggggagcatacccaggccggaactgccatgtccagagctaggagagaggacctgccttctctgagaaaggaggaaagctgcctactacagagggctacagttggactcacagatgggctaggagatgcctcccaactccccgttgctcccactggggaccagccatgccaggccttgcccctactgtcctcccaaacctcagtagctgagagattagtggagcagcctcagttgcatccggatgttagaactgaatgtgagtctggcaccacttcctgggaaagtgatgatgaggagcaaggacccaccgttcctgcagacaatggtcccattccgtctctagtgggagatgatacattagagaaaggaactggccaagctcttgacagtcatcccactatgaaggatcctgtaaatgtgacccccagttccacacctgaatcctcaccgactgattgcctgcagaacagagcatttgatgacgaattagggcttggtggctcatgccctcctatgagggaaagtgatactagacaagaaaacttgaaaaccaaggctctcgtttctaacagttctttgcattggatacccatcccatcgaatgatgaggtagtgaaacagcccaaaccagaatccagagaacacataccatctgttgagccccaggttggagaggagtgggagaaagctgctcccacccctcctgcattgcctggggatttgacagctgaggagggtctagatcctcttgacagccttacttcactctggactgtgccatctcgaggaggcagtgacagcaatggcagttactgtcaacaggtggacattgaaaagctgaaaatcaacggagactctgaagcactgagtcctcacggtgagtccacggatacagcctctgactttgaaggtcacctcacggaggacagcagtgaggctgacactagagaagctgcagtgacaaagggatcttcggtggacaaggatgagaaacccaattggaaccaatctgccccactgtccaaggtgaatggtgacatgcgtctggttacaaggacagatgggatggttgctcctcagagctgggtgtctcgagtatgtgcggtccgccaaaagatcccagattccctactgctggccagtactgagtaccagccaagagccgtgtgcctgtccatgcctgggtcctcagtggatgccactaacccacttgtgatgcagttgctgcagggtagcttgcccctagagaaggttcttccaccagcccacgatgacagcatgtcagaatccccacaagtaccacttacaaaagaccagagccatggctcgctacgcatgggatctttacatggtcttggaaaaaacagtggcatggttgatggaagcagccccagttctttaagggctttgaaggagcctcttctgccagatagctgtgaaacaggcactggtcttgccaggattgaggccacccaggctcctggagcaccccaaaagaattgcaaggcagtcccaagttttgactccctccatccagtgacaaatcccattacatcctctaggaaactggaagaaatggattccaaagagcagttctcttcctttagttgtgaagatcagaaggaagtccgtgctatgtcacaggacagtaattcaaatgctgctccaggaaagagcccaggagatcttactacctcgagaacacctcgtttctcatctccaaatgtgatctcctttggtccagagcagacaggtcgggccctgggtgatcagagcaatgttacaggccaagggaagaagctttttggctctgggaatgtggctgcaacccttcagcgccccaggcctgcggacccgatgcctcttcctgctgagatccctccagtttttcccagtgggaagttgggaccaagcacaaactccatgtctggtggggtacagactccaagggaagactgggctccaaagccacatgcctttgttggcagcgtcaagaatgagaagacttttgtggggggtcctcttaaggcaaatgccgagaacaggaaagctactgggcatagtcccctggaactggtgggtcacttggaagggatgccctttgtcatggacttgcccttctggaaattaccccgagagccagggaaggggctcagtgagcctctggagccttcttctctcccctcccaactcagcatcaagcaggcattttatgggaagctttctaaactccaactgagttccaccagctttaattattcctctagctctcccacctttcccaaaggccttgctggaagtgtggtgcagctgagccacaaagcaaactttggtgcgagccacagtgcatcactttccttgcaaatgttcactgacagcagcacggtggaaagcatctcgctccagtgtgcgtgcagcctgaaagccatgatcatgtgccaaggctgcggtgcgttctgtcacgatgactgtattggaccctcaaagctctgtgtattgtgccttgtggtgagataataaattatggccatgggaaaaaaaaaa

SEQ ID NO: 285 - RNA, 7031 nt, Homo sapiens
  source 1..7031: mol_type = other RNA
cggcagacacgcacgcacccgggcgccgaagggaaagccgcgtctcgccctcccgccccgccgtcggtcctgtctcagtccctcagcagagcgggaaagcggaggccggagccgtgacctctgaccccgtggttatgcggagccgccgcattccttagcgatcgcggggcagccgccgctgccgccgtgggcgactgacgcagcgcgggcgcgtggagccgccgccgcccctcccccaccgccgctctcgcgccagccggtccccgcgtgcccgccccttctccccggccgcacccgagacctcgcgcgccgccgctgccacgcgccccccccaccgccgccgccgccccagccccgcgccaccgccccagcccgcccagcccggaggtcccgcgtggagctgccgccgccgccggggagaaggatgaaggacaaacagaagaagaagaaggagcgcacgtgggccgaggccgcgcgcctggtattagaaaactactcggatgctccaatgacaccaaaacagattctgcaggtcatagaggcagaaggactaaaggaaatgagaagtgggacttcccctctcgcatgcctcaatgctatgctacattccaattcaagaggaggagaggggttgttttataaactgcctggccgaatcagccttttcacgctcaagaaggatgccctgcagtggtctcgccatccagctacagtggagggagaggagccagaggacacggctgatgtggagagctgtgggtctaatgaagccagcactgtgagtggtgaaaacgatgtatctcttgatgaaacatcttcgaacgcatcctgttctacagaatctcagagtcgacctctttccaatcccagggacagctacagagcttcctcacaggcgaacaaacaaaagaaaaagactggggtgatgctgcctcgagttgtcctgactcctctgaaggtaaacggggcccacgtggaatctgcatcagggttctcgggctgccacgccgatggcgagagcggcagcccgtccagcagcagcagcggctctctggccctgggcagcgctgctattcgtggccaggccgaggtcacccaggaccctgccccgctcctgagaggcttccggaagccagccacaggtcaaatgaagcgcaacagaggggaagaaatagattttgagacacctgggtccattcttgtcaacaccaacctccgtgccctgatcaactctcggaccttccatgccttaccatcacacttccagcagcagctcctcttcctcctgcctgaagtagacagacaggtggggacggatggcctgttgcgtctcagcagcagtgcactaaataacgagttttttacccatgcggctcagagctggcgggagcgcctggctgatggtgaatttactcatgagatgcaagtcaggatacgacaggaaatggagaaggaaaagaaggtggaacaatggaaagaaaagttctttgaagactactatggacagaagctgggtttgaccaaagaagagtcattgcagcagaacgtgggccaggaggaggctgaaatcaaaagtggcttgtgtgtcccaggagaatcagtgcgtatacagcgtggtccagccacccgacagcgagatgggcattttaagaaacgctctcggccagatctccgaaccagagccagaaggaatctgtacaaaaaacaggagtcagaacaagcaggggttgctaaggatgcaaaatctgtggcctcagatgttcccctctacaaggatggggaggctaagactgacccagcagggctgagcagtccccatctgccaggcacatcctctgcagcacccgacctggagggtcccgaattcccagttgagtctgtggcttctcggatccaggctgagccagacaacttggcacgtgcctctgcatctccagacagaattcctagcctgcctcaggaaactgtggatcaggaacccaaggatcagaagaggaaatcctttgagcaggcggcctctgcatcctttcccgaaaagaagccccggcttgaagatcgtcagtcctttcgtaacacaattgaaagtgttcacaccgaaaagccacagcccactaaagaggagcccaaagtcccgcccatccggattcaactttcacgtatcaaaccaccctgggtggttaaaggtcagcccacttaccagatatgcccccggatcatccccaccacggagtcctcctgccggggttggactggcgccaggaccctcgcagacattaaagcccgtgctctgcaggtccgaggggcgagaggtcaccactgccatagagaggcggccaccactgccatcggaggggggggtggcccgggtggaggtggcggcggggccaccgatgagggaggtggcagaggcagcagcagtggtgatggtggtgaggcctgtggccaccctgagcccaggggaggcccgagcacccctggaaagtgtacgtcagatctacagcgaacacaactactgccgccttatcctctaaatggggagcatacccaggccggaactgccatgtccagagctaggagagaggacctgccttctctgagaaaggaggaaagctgcctactacagagggctacagttggactcacagatgggctaggagatgcctcccaactccccgttgctcccactggggaccagccatgccaggccttgcccctactgtcctcccaaacctcagtagctgagagattagtggagcagcctcagttgcatccggatgttagaactgaatgtgagtctggcaccacttcctgggaaagtgatgatgaggagcaaggacccaccgttcctgcagacaatggtcccattccgtctctagtgggagatgatacattagagaaaggaactggccaagctcttgacagtcatcccactatgaaggatcctgtaaatgtgacccccagttccacacctgaatcctcaccgactgattgcctgcagaacagagcatttgatgacgaattagggcttggtggctcatgccctcctatgagggaaagtgatactagacaagaaaacttgaaaaccaaggctctcgtttctaacagttctttgcattggatacccatcccatcgaatgatgaggtagtgaaacagcccaaaccagaatccagagaacacataccatctgttgagccccaggttggagaggagtgggagaaagctgctcccacccctcctgcattgcctggggatttgacagctgaggagggtctagatcctcttgacagccttacttcactctggactgtgccatctcgaggaggcagtgacagcaatggcagttactgtcaacaggtggacattgaaaagctgaaaatcaacggagactctgaagcactgagtcctcacggtgagtccacggatacagcctctgactttgaaggtcacctcacggaggacagcagtgaggctgacactagagaagctgcagtgacaaagggatcttcggtggacaaggatgagaaacccaattggaaccaatctgccccactgtccaaggtgaatggtgacatgcgtctggttacaaggacagatgggatggttgctcctcagagctgggtgtctcgagtatgtgcggtccgccaaaagatcccagattccctactgctggccagtactgagtaccagccaagagccgtgtgcctgtccatgcctgggtcctcagtggaggccactaacccacttgtgatgcagttgctgcagggtagcttgcccctagagaaggttcttccaccagcccacgatgacagcatgtcagaatccccacaagtaccacttacaaaagaccagagccatggctcgctacgcatgggatctttacatggtcttggaaaaaacagtggcatggttgatggaagcagccccagttctttaagggctttgaaggagcctcttctgccagatagctgtgaaacaggcactggtcttgccaggattgaggccacccaggctcctggagcaccccaaaagaattgcaaggcagtcccaagttttgactccctccatccagtgacaaatcccattacatcctctaggaaactggaagaaatggattccaaagagcagttctcttcctttagttgtgaagatcagaaggaagtccgtgctatgtcacaggacagtaattcaaatgctgctccaggaaagagcccaggagatcttactacctcgagaacacctcgtttctcatctccaaatgtgatctcctttggtccagagcagacaggtcgggccctgggtgatcagagcaatgttacaggccaagggaagaagctttttggctctgggaatgtggctgcaacccttcagcgccccaggcctgcggacccgatgcctcttcctgctgagatccctccagtttttcccagtgggaagttgggaccaagcacaaactccatgtctggtggggtacagactccaagggaagactgggctccaaagccacatgcctttgttggcagcgtcaagaatgagaagacttttgtggggggtcctcttaaggcaaatgccgagaacaggaaagctactgggcatagtcccctggaactggtgggtcacttggaagggatgccctttgtcatggacttgcccttctggaaattaccccgagagccagggaaggggctcagtgagcctctggagccttcttctctcccctcccaactcagcatcaagcaggcattttatgggaagctttctaaactccaactgagttccaccagctttaattattcctctagctctcccacctttcccaaaggccttgctggaagtgtggtgcagctgagccacaaagcaaactttggtgcgagccacagtgcatcactttccttgcaaatgttcactgacagcagcacggtggaaagcatctcgctccagtgtgcgtgcagcctgaaagccatgatcatgtgccaaggctgcggtgcgttctgtcacgatgactgtattggaccctcaaagctctgtgtattgtgccttgtggtgagataataaattatggccatgggaaacattgtatatttagtgtgtgtattttgataatgattgatcttaaatctgtatacagaatatcattgatataatactctttaggcaggagcactcttgccttcccccaaaatttacactgctaaagccctctgtcacttggcgacccttctggtcttgctggaggggtttcctgggtataacccattgggctgcccaaggccagccagcctgagctctcctgcaagacagagcctgatgtggcacggagtggggttgcggggggtggggggactgcctgactcccagagggacttgaaactgaagcaagaaggttgcattctccaccaagggagttaacctacctgaactaagtagaaatgccagtcttccactaccccctccctgccatcttttcttctgctactttggggagttgatggccaggaaagaagccagcacagggttaaagtaactcctggcattgcccaccagggggctggtgcacctgctgacctcagggtcacagttgagtcatttgccagttgacggagcaagtttgaccttggttctgttgctgaagcaaatttggaacttttctgtctcagtgtgatccactaacccacaggatcatttggaaccttgaatagctctgcttggacaatggggttggggaatagggttgtctttcctatgaaaatgccatctgtagaccttgtgagtcagccgtccagatgtttgcaggtgaattcctctgcttgacatcctccctgtcactttggaccctatgggagtgggcatctccacgcacctgtgtatgtgaaagtcattttacatttcaaagcagtgtgtgtttcttatttttatatttttaactctttattcttggatgtataaagtgaactttttggcttctgtaagtatgctctatgcacctctaatgttttatcatgtatttatatgttgtacacagtactggctgattctgtaaatggatgtattgtacagagaacatgaacgtctcttcctaattttacatcttcagcatcattgcattaaagtggtgtaatctccttctctacatctgttgtcagagccactgagtgctgtgctgctcgacgtgagggtgaaatgattgacttgtgacctgccaggttgcccgatgccctgttgggtcaccggctggacctgctgcagcctgcagagccacagtcagcctgcccacatgccaccgagcaaacgcatcttgcttttcacatctctcctcctacagccttaatggctgcttgctgccatatgtgacaaatcaccaccaccagtgttaagtgcttctggattcatgggtgagttccctgggcagcccccaggaaggccttccagatctggctccagggtcaccacctgtcacagcaatacctgggaccatgctctcctgggactgtgaggctccttttgacgtacttttgacatcaggcaggtttgggaagaaacaaagccatgcctgctcctgcctctctcccaacatgtttccagcaagtagatgcccctgtgtgtgttttcccttgccttgtttcctgccttatatcttgtatttcgacttattacagagttgagggttcttgcttaatttagatcaagtataaaatttgtatgacttcaagtctcattttatctgaaaggtttttttctcatttaatctgatgtggcattttcgtcatctgaagcatgagtgacaagttgggaatgatgtggtgatttagaatgcagtattggccaagtccaagttgtcaacttaagcgtctgtttaccaaagaccgggaacaggggcccaaacatgtccagtcctcttcttccctctgctggaacctttggggacactcaagggtacagtttgacactgatctggtccatgaggctgcccagagaaagcactgcttctgtatgtctcttgtggtattggaacaataaacccgtacaacctgca

SEQ ID NO: 286 - RNA, 296 nt, Homo sapiens
  source 1..296: mol_type = other RNA
gtgggccgaggccgcgcgcctggtattagaaaactactcggatgctccaatgacaccaaaacagattctgcaggtcatagaggcagaaggactaaaggaaatgagaagtgggacttcccctctcgcatgcctcaatgctatgctacattccaattcaagaggaggagaggggttgttttataaactgcctggccgaatcagccttttcacgctcaaggtgtgagccactgcaccaggccccttcatcttaattttaatatatctttgaataaacaccattgtatgaacctgctgta

SEQ ID NO: 287 - RNA, 1034 nt, Homo sapiens
  source 1..1034: mol_type = other RNA
aattttctctcttattttgaagtgagttttctgcttcaaaggtgttgtgcaaaaaaaaaaaaaatagactgtattgggggggttgacacaaacctgaagtacacctttttctttctcgaagtctgtaaaagttacagatttataaaaactgaaggaatttgggctacagaattttcattggtgcttgctatcctcttccctagtcatttgttgcccagggaacaaaaatagcaattgtttgtatgctgaagttttgtgcttcagtttattttggcctggcatgtgaagtttgaagattttgaggttccgaaatattttttttctgattgagtcaaaattggaagcttgggctagttttcaggatcttgtagaaatttcaggatttctctaacggttctgcacctggaaacaaatataggcctgatggggagtgggagagagctctcgttctcctcctcgacaatgagttttgtgtgttcattgacattctccttggcgttcctgttatgcgggtgtttatgaccctgggcacccaaggaaatttgcttgccagagttttacttgttagagtctctttagattctcgaatttaccgtggtctgaacttcaacatcgaggttgctatttctgttttatcattgactcaacttcaagccaggttatcagggtattagaaaactactcggatgctccaatgacaccaaaacagattctgcaggtcatagaggcagaaggactaaaggaaatgagaagtgggacttcccctctcgcatgcctcaatgctatgctacattccaattcaagaggaggagaggggttgttttataaactgcctggccgaatcagccttttcacgctcaagagatgaagtcttgctatgttggttaaactggtctcaaactcctggcctcaagtgatcttcccaccacagcttcacaaagcactgggatggattacaggtgtgagccactgcaccaggccccttcatcttaattttaatatatctttgaataaacaccattgtatgaacctgc

SEQ ID NO: 288 - DNA, 3146 bp, Homo sapiens
  source 1..3146: mol_type = genomic DNA
cacacacactcacacacacccacggcagacacgcacgcacccgggcgccgaagggaaagccgcgtctcgccctcccgccccgccgtcggtcctgtctcagtccctcagcagagcgggaaagcggaggccggagccgtgacctctgaccccgtggttatgcggagccgccgcattccttagcgatcgcggggcagccgccgctgccgccgtgggcgactgacgcagcgcgggcgcgtggagccgccgccgcccctcccccaccgccgctctcgcgccagccggtccccgcgtgcccgccccttctccccggccgcacccgagacctcgcgcgccgccgctgccacgcgccccccccaccgccgccgccgccccagccccgcgccaccgccccagcccgcccagcccggaggtcccgcgtggagctgccgccgccgccggggagaaggatgaaggacaaacagaagaagaagaaggagcgcacgtgggccgaggccgcgcgcctggtattagaaaactactcggatgctccaatgacaccaaaacagattctgcaggtcatagaggcagaaggactaaaggaaatgagaagtgggacttcccctctcgcatgcctcaatgctatgctacattccaattcaagaggaggagaggggttgttttataaactgcctggccgaatcagccttttcacgctcaagaaggatgccctgcagtggtctcgccatccagctacagtggagggagaggagccagaggacacggctgatgtggagagctgtgggtctaatgaagccagcactgtgagtggtgaaaacgatgtatctcttgatgaaacatcttcgaacgcatcctgttctacagaatctcagagtcgacctctttccaatcccagggacagctacagagcttcctcacaggcgaacaaacaaaagaaaaagactggggtgatgctgcctcgagttgtcctgactcctctgaaggtaaacggggcccacgtggaatctgcatcagggttctcgggctgccacgccgatggcgagagcggcagcccgtccagcagcagcagcggctctctggccctgggcagcgctgctattcgtggccaggccgaggtcacccaggaccctgccccgctcctgagaggcttccggaagccagccacaggtcaaatgaagcgcaacagaggggaagaaatagattttgagacacctgggtccattcttgtcaacaccaacctccgtgccctgatcaactctcggaccttccatgccttaccatcacacttccagcagcagctcctcttcctcctgcctgaagtagacagacaggtggggacggatggcctgttgcgtctcagcagcagtgcactaaataacgagttttttacccatgcggctcagagctggcgggagcgcctggctgatggtgaatttactcatgagatgcaagtcaggatacgacaggaaatggagaaggaaaagaaggtggaacaatggaaagaaaagttctttgaagactactatggacagaagctgggtttgaccaaagaagagtcattgcagcagaacgtgggccaggaggaggctgaaatcaaaagtggcttgtgtgtcccaggagaatcagtgcgtatacagcgtggtccagccacccgacagcgagatgggcattttaagaaacgctctcggccagatctccgaaccagagccagaaggaatctgtacaaaaaacaggagtcagaacaagcaggggttgctaaggatgcaaaatctgtggcctcagatgttcccctctacaaggatggggaggctaagactgacccagcagggctgagcagtccccatctgccaggcacatcctctgcagcacccgacctggagggtcccgaattcccagttgagtctgtggcttctcggatccaggctgagccagacaacttggcacgtgcctctgcatctccagacagaattcctagcctgcctcaggaaactgtggatcaggaacccaaggatcagaagaggaaatcctttgagcaggcggcctctgcatcctttcccgaaaagaagccccggcttgaagatcgtcagtcctttcgtaacacaattgaaagtgttcacaccgaaaagccacagcccactaaagaggagcccaaagtcccgcccatccggattcaactttcacgtatcaaaccaccctgggtggttaaaggtcagcccacttaccagatatgcccccggatcatccccaccacggagtcctcctgccggggttggactggcgccaggaccctcgcagacattaaagcccgtgctctgcagagccactgagtgctgtgctgctcgacgtgagggtgaaatgattgacttgtgacctgccaggttgcccgatgccctgttgggtcaccggctggacctgctgcagcctgcagagccacagtcagcctgcccacatgccaccgagcaaacgcatcttgcttttcacatctctcctcctacagccttaatggctgcttgctgccatatgtgacaaatcaccaccaccagtgttaagtgcttctggattcatgggtgagttccctgggcagcccccaggaaggccttccagatctggctccagggtcaccacctgtcacagcaatacctgggaccatgctctcctgggactgtgaggctccttttgacgtacttttgacatcaggcaggtttgggaagaaacaaagccatgcctgctcctgcctctctcccaacatgtttccagcaagtagatgcccctgtgtgtgttttcccttgccttgtttcctgccttatatcttgtatttcgacttattacagagttgagggttcttgcttaatttagatcaagtataaaatttgtatgacttcaagtctcattttatctgaaaggtttttttctcatttaatctgatgtggcattttcgtcatctgaagcatgagtgacaagttgggaatgatgtggtgatttagaatgcagtattggccaagtccaagttgtcaacttaagcgtctgtttaccaaagaccgggaacaggggcccaaacatgtccagtcctcttcttccctctgctggaacctttggggacactcaagggtacagtttgacactgatctggtccatgaggctgcccagag

SEQ ID NO: 289 - DNA, 7052 bp, Homo sapiens
  source 1..7052: mol_type = genomic DNA
acacacactcacacacacccacggcagacacgcacgcacccgggcgccgaagggaaagccgcgtctcgccctcccgccccgccgtcggtcctgtctcagtccctcagcagagcgggaaagcggaggccggagccgtgacctctgaccccgtggttatgcggagccgccgcattccttagcgatcgcggggcagccgccgctgccgccgtgggcgactgacgcagcgcgggcgcgtggagccgccgccgcccctcccccaccgccgctctcgcgccagccggtccccgcgtgcccgccccttctccccggccgcacccgagacctcgcgcgccgccgctgccacgcgccccccccaccgccgccgccgccccagccccgcgccaccgccccagcccgcccagcccggaggtcccgcgtggagctgccgccgccgccggggagaaggatgaaggacaaacagaagaagaagaaggagcgcacgtgggccgaggccgcgcgcctggtattagaaaactactcggatgctccaatgacaccaaaacagattctgcaggtcatagaggcagaaggactaaaggaaatgagaagtgggacttcccctctcgcatgcctcaatgctatgctacattccaattcaagaggaggagaggggttgttttataaactgcctggccgaatcagccttttcacgctcaagaaggatgccctgcagtggtctcgccatccagctacagtggagggagaggagccagaggacacggctgatgtggagagctgtgggtctaatgaagccagcactgtgagtggtgaaaacgatgtatctcttgatgaaacatcttcgaacgcatcctgttctacagaatctcagagtcgacctctttccaatcccagggacagctacagagcttcctcacaggcgaacaaacaaaagaaaaagactggggtgatgctgcctcgagttgtcctgactcctctgaaggtaaacggggcccacgtggaatctgcatcagggttctcgggctgccacgccgatggcgagagcggcagcccgtccagcagcagcagcggctctctggccctgggcagcgctgctattcgtggccaggccgaggtcacccaggaccctgccccgctcctgagaggcttccggaagccagccacaggtcaaatgaagcgcaacagaggggaagaaatagattttgagacacctgggtccattcttgtcaacaccaacctccgtgccctgatcaactctcggaccttccatgccttaccatcacacttccagcagcagctcctcttcctcctgcctgaagtagacagacaggtggggacggatggcctgttgcgtctcagcagcagtgcactaaataacgagttttttacccatgcggctcagagctggcgggagcgcctggctgatggtgaatttactcatgagatgcaagtcaggatacgacaggaaatggagaaggaaaagaaggtggaacaatggaaagaaaagttctttgaagactactatggacagaagctgggtttgaccaaagaagagtcattgcagcagaacgtgggccaggaggaggctgaaatcaaaagtggcttgtgtgtcccaggagaatcagtgcgtatacagcgtggtccagccacccgacagcgagatgggcattttaagaaacgctctcggccagatctccgaaccagagccagaaggaatctgtacaaaaaacaggagtcagaacaagcaggggttgctaaggatgcaaaatctgtggcctcagatgttcccctctacaaggatggggaggctaagactgacccagcagggctgagcagtccccatctgccaggcacatcctctgcagcacccgacctggagggtcccgaattcccagttgagtctgtggcttctcggatccaggctgagccagacaacttggcacgtgcctctgcatctccagacagaattcctagcctgcctcaggaaactgtggatcaggaacccaaggatcagaagaggaaatcctttgagcaggcggcctctgcatcctttcccgaaaagaagccccggcttgaagatcgtcagtcctttcgtaacacaattgaaagtgttcacaccgaaaagccacagcccactaaagaggagcccaaagtcccgcccatccggattcaactttcacgtatcaaaccaccctgggtggttaaaggtcagcccacttaccagatatgcccccggatcatccccaccacggagtcctcctgccggggttggactggcgccaggaccctcgcagacattaaagcccgtgctctgcaggtccgaggggcgagaggtcaccactgccatagagaggcggccaccactgccatcggaggggggggtggcccgggtggaggtggcggcggggccaccgatgagggaggtggcagaggcagcagcagtggtgatggtggtgaggcctgtggccaccctgagcccaggggaggcccgagcacccctggaaagtgtacgtcagatctacagcgaacacaactactgccgccttatcctctaaatggggagcatacccaggccggaactgccatgtccagagctaggagagaggacctgccttctctgagaaaggaggaaagctgcctactacagagggctacagttggactcacagatgggctaggagatgcctcccaactccccgttgctcccactggggaccagccatgccaggccttgcccctactgtcctcccaaacctcagtagctgagagattagtggagcagcctcagttgcatccggatgttagaactgaatgtgagtctggcaccacttcctgggaaagtgatgatgaggagcaaggacccaccgttcctgcagacaatggtcccattccgtctctagtgggagatgatacattagagaaaggaactggccaagctcttgacagtcatcccactatgaaggatcctgtaaatgtgacccccagttccacacctgaatcctcaccgactgattgcctgcagaacagagcatttgatgacgaattagggcttggtggctcatgccctcctatgagggaaagtgatactagacaagaaaacttgaaaaccaaggctctcgtttctaacagttctttgcattggatacccatcccatcgaatgatgaggtagtgaaacagcccaaaccagaatccagagaacacataccatctgttgagccccaggttggagaggagtgggagaaagctgctcccacccctcctgcattgcctggggatttgacagctgaggagggtctagatcctcttgacagccttacttcactctggactgtgccatctcgaggaggcagtgacagcaatggcagttactgtcaacaggtggacattgaaaagctgaaaatcaacggagactctgaagcactgagtcctcacggtgagtccacggatacagcctctgactttgaaggtcacctcacggaggacagcagtgaggctgacactagagaagctgcagtgacaaagggatcttcggtggacaaggatgagaaacccaattggaaccaatctgccccactgtccaaggtgaatggtgacatgcgtctggttacaaggacagatgggatggttgctcctcagagctgggtgtctcgagtatgtgcggtccgccaaaagatcccagattccctactgctggccagtactgagtaccagccaagagccgtgtgcctgtccatgcctgggtcctcagtggaggccactaacccacttgtgatgcagttgctgcagggtagcttgcccctagagaaggttcttccaccagcccacgatgacagcatgtcagaatccccacaagtaccacttacaaaagaccagagccatggctcgctacgcatgggatctttacatggtcttggaaaaaacagtggcatggttgatggaagcagccccagttctttaagggctttgaaggagcctcttctgccagatagctgtgaaacaggcactggtcttgccaggattgaggccacccaggctcctggagcaccccaaaagaattgcaaggcagtcccaagttttgactccctccatccagtgacaaatcccattacatcctctaggaaactggaagaaatggattccaaagagcagttctcttcctttagttgtgaagatcagaaggaagtccgtgctatgtcacaggacagtaattcaaatgctgctccaggaaagagcccaggagatcttactacctcgagaacacctcgtttctcatctccaaatgtgatctcctttggtccagagcagacaggtcgggccctgggtgatcagagcaatgttacaggccaagggaagaagctttttggctctgggaatgtggctgcaacccttcagcgccccaggcctgcggacccgatgcctcttcctgctgagatccctccagtttttcccagtgggaagttgggaccaagcacaaactccatgtctggtggggtacagactccaagggaagactgggctccaaagccacatgcctttgttggcagcgtcaagaatgagaagacttttgtggggggtcctcttaaggcaaatgccgagaacaggaaagctactgggcatagtcccctggaactggtgggtcacttggaagggatgccctttgtcatggacttgcccttctggaaattaccccgagagccagggaaggggctcagtgagcctctggagccttcttctctcccctcccaactcagcatcaagcaggcattttatgggaagctttctaaactccaactgagttccaccagctttaattattcctctagctctcccacctttcccaaaggccttgctggaagtgtggtgcagctgagccacaaagcaaactttggtgcgagccacagtgcatcactttccttgcaaatgttcactgacagcagcacggtggaaagcatctcgctccagtgtgcgtgcagcctgaaagccatgatcatgtgccaaggctgcggtgcgttctgtcacgatgactgtattggaccctcaaagctctgtgtattgtgccttgtggtgagataataaattatggccatgggaaacattgtatatttagtgtgtgtattttgataatgattgatcttaaatctgtatacagaatatcattgatataatactctttaggcaggagcactcttgccttcccccaaaatttacactgctaaagccctctgtcacttggcgacccttctggtcttgctggaggggtttcctgggtataacccattgggctgcccaaggccagccagcctgagctctcctgcaagacagagcctgatgtggcacggagtggggttgcggggggtggggggactgcctgactcccagagggacttgaaactgaagcaagaaggttgcattctccaccaagggagttaacctacctgaactaagtagaaatgccagtcttccactaccccctccctgccatcttttcttctgctactttggggagttgatggccaggaaagaagccagcacagggttaaagtaactcctggcattgcccaccagggggctggtgcacctgctgacctcagggtcacagttgagtcatttgccagttgacggagcaagtttgaccttggttctgttgctgaagcaaatttggaacttttctgtctcagtgtgatccactaacccacaggatcatttggaaccttgaatagctctgcttggacaatggggttggggaatagggttgtctttcctatgaaaatgccatctgtagaccttgtgagtcagccgtccagatgtttgcaggtgaattcctctgcttgacatcctccctgtcactttggaccctatgggagtgggcatctccacgcacctgtgtatgtgaaagtcattttacatttcaaagcagtgtgtgtttcttatttttatatttttaactctttattcttggatgtataaagtgaactttttggcttctgtaagtatgctctatgcacctctaatgttttatcatgtatttatatgttgtacacagtactggctgattctgtaaatggatgtattgtacagagaacatgaacgtctcttcctaattttacatcttcagcatcattgcattaaagtggtgtaatctccttctctacatctgttgtcagagccactgagtgctgtgctgctcgacgtgagggtgaaatgattgacttgtgacctgccaggttgcccgatgccctgttgggtcaccggctggacctgctgcagcctgcagagccacagtcagcctgcccacatgccaccgagcaaacgcatcttgcttttcacatctctcctcctacagccttaatggctgcttgctgccatatgtgacaaatcaccaccaccagtgttaagtgcttctggattcatgggtgagttccctgggcagcccccaggaaggccttccagatctggctccagggtcaccacctgtcacagcaatacctgggaccatgctctcctgggactgtgaggctccttttgacgtacttttgacatcaggcaggtttgggaagaaacaaagccatgcctgctcctgcctctctcccaacatgtttccagcaagtagatgcccctgtgtgtgttttcccttgccttgtttcctgccttatatcttgtatttcgacttattacagagttgagggttcttgcttaatttagatcaagtataaaatttgtatgacttcaagtctcattttatctgaaaggtttttttctcatttaatctgatgtggcattttcgtcatctgaagcatgagtgacaagttgggaatgatgtggtgatttagaatgcagtattggccaagtccaagttgtcaacttaagcgtctgtttaccaaagaccgggaacaggggcccaaacatgtccagtcctcttcttccctctgctggaacctttggggacactcaagggtacagtttgacactgatctggtccatgaggctgcccagagaaagcactgcttctgtatgtctcttgtggtattggaacaataaacccgtacaacctgca

SEQ ID NO: 290 - DNA, 1068 bp, Homo sapiens
  source 1..1068: mol_type = genomic DNA
cacacccacggcagacacgcacgcacccgggcgccgaagggaaagccgcgtctcgccctcccgccccgccgtcggtcctgtctcagtccctcagcagagcgggaaagcggaggccggagccgtgacctctgaccccgtggttatgcggagccgccgcattccttagcgatcgcggggcagccgccgctgccgccgtgggcgactgacgcagcgcgggcgcgtggagccgccgccgcccctcccccaccgccgctctcgcgccagccggtccccgcgtgcccgccccttctccccggccgcacccgagacctcgcgcgccgccgctgccacgcgccccccccaccgccgccgccgccccagccccgcgccaccgccccagcccgcccagcccggaggtcccgcgtggagctgccgccgccgccggggagaaggatgaaggacaaacagaagaagaagaaggagcgcacgtgggccgaggccgcgcgcctggtattagaaaactactcggatgctccaatgacaccaaaacagattctgcaggtcatagaggcagaaggactaaaggaaatgaggagtgggacttcccctctcgcatgcctcaatgctatgctacattccaattcaagaggaggagaggggttgttttataaactgcctggccgaatcagccttttcacgctcaaggtgtgagccactgcaccaggccccttcatcttaattttaatatatctttgaataaacaccattgtatgaacctgctgtaagcttgggagtggtctgttagtctacagcttgtgtctgagatgtgctaattgaatatttgctcagtacctcatcttaactgcctttggctttatgttgcttatccttcatagtatcttgttcattggccttttacatccataggcatcacttctctgatattcgttgtgctcttttaatggattaatggtttgcttggttggttcctctagttagactgtaaactccttgagagcagagtctgtattttattaattacccacagtactaggtacatagttgccttcaataaatatatatttaatg

SEQ ID NO: 291 - DNA, 7038 bp, Homo sapiens
  source 1..7038: mol_type = genomic DNA
cacacccacggcagacacgcacgcacccgggcgccgaagggaaagccgcgtctcgccctcccgccccgccgtcggtcctgtctcagtccctcagcagagcgggaaagcggaggccggagccgtgacctctgaccccgtggttatgcggagccgccgcattccttagcgatcgcggggcagccgccgctgccgccgtgggcgactgacgcagcgcgggcgcgtggagccgccgccgcccctcccccaccgccgctctcgcgccagccggtccccgcgtgcccgccccttctccccggccgcacccgagacctcgcgcgccgccgctgccacgcgccccccccaccgccgccgccgccccagccccgcgccaccgccccagcccgcccagcccggaggtcccgcgtggagctgccgccgccgccggggagaaggatgaaggacaaacagaagaagaagaaggagcgcacgtgggccgaggccgcgcgcctggtattagaaaactactcggatgctccaatgacaccaaaacagattctgcaggtcatagaggcagaaggactaaaggaaatgaggagtgggacttcccctctcgcatgcctcaatgctatgctacattccaattcaagaggaggagaggggttgttttataaactgcctggccgaatcagccttttcacgctcaagaaggatgccctgcagtggtctcgccatccagctacagtggagggagaggagccagaggacacggctgatgtggagagctgtgggtctaatgaagccagcactgtgagtggtgaaaacgatgtatctcttgatgaaacatcttcgaacgcatcctgttctacagaatctcagagtcgacctctttccaatcccagggacagctacagagcttcctcacaggcgaacaaacaaaagaaaaagactggggtgatgctgcctcgagttgtcctgactcctctgaaggtaaacggggcccacgtggaatctgcatcagggttctcgggctgccacgccgatggcgagagcggcagcccgtccagcagcagcagcggctctctggccctgggcagcgctgctattcgtggccaggccgaggtcacccaggaccctgccccgctcctgagaggcttccggaagccagccacaggtcaaatgaagcgcaacagaggggaagaaatagattttgagacacctgggtccattcttgtcaacaccaacctccgtgccctgatcaactctcggaccttccatgccttaccatcacacttccagcagcagctcctcttcctcctgcctgaagtagacagacaggtggggacggatggcctgttgcgtctcagcagcagtgcactaaataacgagttttttacccatgcggctcagagctggcgggagcgcctggctgatggtgaatttactcatgagatgcaagtcaggatacgacaggaaatggagaaggaaaagaaggtggaacaatggaaagaaaagttctttgaagactactatggacagaagctgggtttgaccaaagaagagtcattgcagcagaacgtgggccaggaggaggctgaaatcaaaagtggcttgtgtgtcccaggagaatcagtgcgtatacagcgtggtccagccacccgacagcgagatgggcattttaagaaacgctctcggccagatctccgaaccagagccagaaggaatctgtacaaaaaacaggagtcagaacaagcaggggttgctaaggatgcaaaatctgtggcctcagatgttcccctctacaaggatggggaggctaagactgacccagcagggctgagcagtccccatctgccaggcacatcctctgcagcacccgacctggagggtcccgaattcccagttgagtctgtggcttctcggatccaggctgagccagacaacttggcacgtgcctctgcatctccagacagaattcctagcctgcctcaggaaactgtggatcaggaacccaaggatcagaagaggaaatcctttgagcaggcggcctctgcatcctttcccgaaaagaagccccggcttgaagatcgtcagtcctttcgtaacacaattgaaagtgttcacaccgaaaagccacagcccactaaagaggagcccaaagtcccgcccatccggattcaactttcacgtatcaaaccaccctgggtggttaaaggtcagcccacttaccagatatgcccccggatcatccccaccacggagtcctcctgccggggttggactggcgccaggaccctcgcagacattaaagcccgtgctctgcaggtccgaggggcgagaggtcaccactgccatagagaggcggccaccactgccatcggaggggggggtggcccgggtggaggtggcggcggggccaccgatgagggaggtggcagaggcagcagcagtggtgatggtggtgaggcctgtggccaccctgagcccaggggaggcccgagcacccctggaaagtgtacgtcagatctacagcgaacacaactactgccgccttatcctctaaatggggagcatacccaggccggaactgccatgtccagagctaggagagaggacctgccttctctgagaaaggaggaaagctgcctactacagagggctacagttggactcacagatgggctaggagatgcctcccaactccccgttgctcccactggggaccagccatgccaggccttgcccctactgtcctcccaaacctcagtagctgagagattagtggagcagcctcagttgcatccggatgttagaactgaatgtgagtctggcaccacttcctgggaaagtgatgatgaggagcaaggacccaccgttcctgcagacaatggtcccattccgtctctagtgggagatgatacattagagaaaggaactggccaagctcttgacagtcatcccactatgaaggatcctgtaaatgtgacccccagttccacacctgaatcctcaccgactgattgcctgcagaacagagcatttgatgacgaattagggcttggtggctcatgccctcctatgagggaaagtgatactagacaagaaaacttgaaaaccaaggctctcgtttctaacagttctttgcattggatacccatcccatcgaatgatgaggtagtgaaacagcccaaaccagaatccagagaacacataccatctgttgagccccaggttggagaggagtgggagaaagctgctcccacccctcctgcattgcctggggatttgacagctgaggagggtctagatcctcttgacagccttacttcactctggactgtgccatctcgaggaggcagtgacagcaatggcagttactgtcaacaggtggacattgaaaagctgaaaatcaacggagactctgaagcactgagtcctcacggtgagtccacggatacagcctctgactttgaaggtcacctcacggaggacagcagtgaggctgacactagagaagctgcagtgacaaagggatcttcggtggacaaggatgagaaacccaattggaaccaatctgccccactgtccaaggtgaatggtgacatgcgtctggttacaaggacagatgggatggttgctcctcagagctgggtgtctcgagtatgtgcggtccgccaaaagatcccagattccctactgctggccagtactgagtaccagccaagagccgtgtgcctgtccatgcctgggtcctcagtggaggccactaacccacttgtgatgcagttgctgcagggtagcttgcccctagagaaggttcttccaccagcccacgatgacagcatgtcagaatccccacaagtaccacttacaaaagaccagagccatggctcgctacgcatgggatctttacatggtcttggaaaaaacagtggcatggttgatggaagcagccccagttctttaagggctttgaaggagcctcttctgccagatagctgtgaaacaggcactggtcttgccaggattgaggccacccaggctcctggagcaccccaaaagaattgcaaggcagtcccaagttttgactccctccatccagtgacaaatcccattacatcctctaggaaactggaagaaatggattccaaagagcagttctcttcctttagttgtgaagatcagaaggaagtccgtgctatgtcacaggacagtaattcaaatgctgctccaggaaagagcccaggagatcttactacctcgagaacacctcgtttctcatctccaaatgtgatctcctttggtccagagcagacaggtcgggccctgggtgatcagagcaatgttacaggccaagggaagaagctttttggctctgggaatgtggctgcaacccttcagcgccccaggcctgcggacccgatgcctcttcctgctgagatccctccagtttttcccagtgggaagttgggaccaagcacaaactccatgtctggtggggtacagactccaagggaagactgggctccaaagccacatgcctttgttggcagcgtcaagaatgagaagacttttgtggggggtcctcttaaggcaaatgccgagaacaggaaagctactgggcatagtcccctggaactggtgggtcacttggaagggatgccctttgtcatggacttgcccttctggaaattaccccgagagccagggaaggggctcagtgagcctctggagccttcttctctcccctcccaactcagcatcaagcaggcattttatgggaagctttctaaactccaactgagttccaccagctttaattattcctctagctctcccacctttcccaaaggccttgctggaagtgtggtgcagctgagccacaaagcaaactttggtgcgagccacagtgcatcactttccttgcaaatgttcactgacagcagcacggtggaaagcatctcgctccagtgtgcgtgcagcctgaaagccatgatcatgtgccaaggctgcggtgcgttctgtcacgatgactgtattggaccctcaaagctctgtgtattgtgccttgtggtgagataataaattatggccatgggaaacattgtatatttagtgtgtgtattttgataatgattgatcttaaatctgtatacagaatatcattgatataatactctttaggcaggagcactcttgccttcccccaaaatttacactgctaaagccctctgtcacttggcgacccttctggtcttgctggaggggtttcctgggtataacccattgggctgcccaaggccagccagcctgagctctcctgcaagacagagcctgatgtggcacggagtggggttgcggggggtggggggactgcctgactcccagagggacttgaaactgaagcaagaaggttgcattctccaccaagggagttaacctacctgaactaagtagaaatgccagtcttccactaccccctccctgccatcttttcttctgctactttggggagttgatggccaggaaagaagccagcacagggttaaagtaactcctggcattgcccaccagggggctggtgcacctgctgacctcagggtcacagttgagtcatttgccagttgacggagcaagtttgaccttggttctgttgctgaagcaaatttggaacttttctgtctcagtgtgatccactaacccacaggatcatttggaaccttgaatagctctgcttggacaatggggttggggaatagggttgtctttcctatgaaaatgccatctgtagaccttgtgagtcagccgtccagatgtttgcaggtgaattcctctgcttgacatcctccctgtcactttggaccctatgggagtgggcatctccacgcacctgtgtatgtgaaagtcattttacatttcaaagcagtgtgtgtttcttatttttatatttttaactctttattcttggatgtataaagtgaactttttggcttctgtaagtatgctctatgcacctctaatgttttatcatgtatttatatgttgtacacagtactggctgattctgtaaatggatgtattgtacagagaacatgaacgtctcttcctaattttacatcttcagcatcattgcattaaagtggtgtaatctccttctctacatctgttgtcagagccactgagtgctgtgctgctcgacgtgagggtgaaatgattgacttgtgacctgccaggttgcccgatgccctgttgggtcaccggctggacctgctgcagcctgcagagccacagtcagcctgcccacatgccaccgagcaaacgcatcttgcttttcacatctctcctcctacagccttaatggctgcttgctgccatatgtgacaaatcaccaccaccagtgttaagtgcttctggattcatgggtgagttccctgggcagcccccaggaaggccttccagatctggctccagggtcaccacctgtcacagcaatacctgggaccatgctctcctgggactgtgaggctccttttgacgtacttttgacatcaggcaggtttgggaagaaacaaagccatgcctgctcctgcctctctcccaacatgtttccagcaagtagatgcccctgtgtgtgttttcccttgccttgtttcctgccttatatcttgtatttcgacttattacagagttgagggttcttgcttaatttagatcaagtataaaatttgtatgacttcaagtctcattttatctgaaaggtttttttctcatttaatctgatgtggcattttcgtcatctgaagcatgagtgacaagttgggaatgatgtggtgatttagaatgcagtattggccaagtccaagttgtcaacttaagcgtctgtttaccaaagaccgggaacaggggcccaaacatgtccagtcctcttcttccctctgctggaacctttggggacactcaagggtacagtttgacactgatctggtccatgaggctgcccagagaaagcactgcttctgtatgtctcttgtggtattggaacaataaacccgtacaacctgc

SEQ ID NO: 292 - DNA, 1065 bp, Homo sapiens
  source 1..1065: mol_type = genomic DNA
ccacggcagacacgcacgcacccgggcgccgaagggaaagccgcgtctcgccctcccgccccgccgtcggtcctgtctcagtccctcagcagagcgggaaagcggaggccggagccgtgacctctgaccccgtggttatgcggagccgccgcattccttagcgatcgcggggcagccgccgctgccgccgtgggcgactgacgcagcgcgggcgcgtggagccgccgccgcccctcccccaccgccgctctcgcgccagccggtccccgcgtgcccgccccttctccccggccgcacccgagacctcgcgcgccgccgctgccacgcgccccccccaccgccgccgccgccccagccccgcgccaccgccccagcccgcccagcccggaggtcccgcgtggagctgccgccgccgccggggagaaggatgaaggacaaacagaagaagaagaaggagcgcacgtgggccgaggccgcgcgcctggtattagaaaactactcggatgctccaatgacaccaaaacagattctgcaggtcatagaggcagaaggactaaaggaaatgagaagtgggacttcccctctcgcatgcctcaatgctatgctacattccaattcaagaggaggagaggggttgttttataaactgcctggccgaatcagccttttcacgctcaaggtgtgagccactgcaccaggccccttcatcttaattttaatatatctttgaataaacaccattgtatgaacctgctgtaagcttgggagtggtctgttagtctacagcttgtgtctgagatgtgctaattgaatatttgctcagtacctcatcttaactgcctttggctttatgttgcttatccttcatagtatcttgttcattggccttttacatccataggcatcacttctctgatattcgttgtgctcttttaatggattaatggtttgcttggttggttcctctagttagactgtaaactccttgagagcagagtctgtattttattaattacccacagtactaggtacatagttgccttcaataaatatatatttaatgaa

SEQ ID NO: 293 - DNA, 5374 bp, Homo sapiens
  source 1..5374: mol_type = genomic DNA
cgtcggtcctgtctcagtccctcagcagagcgggaaagcggaggccggagccgtgacctctgaccccgtggttatgcggagccgccgcattccttagcgatcgcggggcagccgccgctgccgccgtgggcgactgacgcagcgcgggcgcgtggagccgccgccgcccctcccccaccgccgccggggagaaggatgaaggacaaacagaagaagaagaaggagcgcacgtgggccgaggccgcgcgcctggtattagaaaactactcggatgctccaatgacaccaaaacagattctgcaggtcatagaggcagaaggactaaaggaaatgaggagtgggacttcccctctcgcatgcctcaatgctatgctacattccaattcaagaggaggagaggggttgttttataaactgcctggccgaatcagccttttcacgctcaagaaggatgccctgcagtggtctcgccatccagctacagtggagggagaggagccagaggacacggctgatgtggagagctgtgggtctaatgaagccagcactgtgagtggtgaaaacgatgtatctcttgatgaaacatcttcgaacgcatcctgttctacagaatctcagagtcgacctctttccaatcccagggacagctacagagcttcctcacaggcgaacaaacaaaagaaaaagactggggtgatgctgcctcgagttgtcctgactcctctgaaggtaaacggggcccacgtggaatctgcatcagggttctcgggctgccacgccgatggcgagagcggcagcccgtccagcagcagcagcggctctctggccctgggcagcgctgctattcgtggccaggccgaggtcacccaggaccctgccccgctcctgagaggcttccggaagccagccacaggtcaaatgaagcgcaacagaggggaagaaatagattttgagacacctgggtccattcttgtcaacaccaacctccgtgccctgatcaactctcggaccttccatgccttaccatcacacttccagcagcagctcctcttcctcctgcctgaagtagacagacaggtggggacggatggcctgttgcgtctcagcagcagtgcactaaataacgagttttttacccatgcggctcagagctggcgggagcgcctggctgatggtgaatttactcatgagatgcaagtcaggatacgacaggaaatggagaaggaaaagaaggtggaacaatggaaagaaaagttctttgaagactactatggacagaagctgggtttgaccaaagaagagtcattgcagcagaacgtgggccaggaggaggctgaaatcaaaagtggcttgtgtgtcccaggagaatcagtgcgtatacagcgtggtccagccacccgacagcgagatgggcattttaagaaacgctctcggccagatctccgaaccagagccagaaggaatctgtacaaaaaacaggagtcagaacaagcaggggttgctaaggatgcaaaatctgtggcctcagatgttcccctctacaaggatggggaggctaagactgacccagcagggctgagcagtccccatctgccaggcacatcctctgcagcacccgacctggagggtcccgaattcccagttgagtctgtggcttctcggatccaggctgagccagacaacttggcacgtgcctctgcatctccagacagaattcctagcctgcctcaggaaactgtggatcaggaacccaaggatcagaagaggaaatcctttgagcaggcggcctctgcatcctttcccgaaaagaagccccggcttgaagatcgtcagtcctttcgtaacacaattgaaagtgttcacaccgaaaagccacagcccactaaagaggagcccaaagtcccgcccatccggattcaactttcacgtatcaaaccaccctgggtggttaaaggtcagcccacttaccagatatgcccccggatcatccccaccacggagtcctcctgccggggttggactggcgccaggaccctcgcagacattaaagcccgtgctctgcaggtccgaggggcgagaggtcaccactgccatagagaggcggccaccactgccatcggaggggggggtggcccgggtggaggtggcggcggggccaccgatgagggaggtggcagaggcagcagcagtggtgatggtggtgaggcctgtggccaccctgagcccaggggaggcccgagcacccctggaaagtgtacgtcagatctacagcgaacacaactactgccgccttatcctctaaatggggagcatacccaggccggaactgccatgtccagagctaggagagaggacctgccttctctgagaaaggaggaaagctgcctactacagagggctacagttggactcacagatgggctaggagatgcctcccaactccccgttgctcccactggggaccagccatgccaggccttgcccctactgtcctcccaaacctcagtagctgagagattagtggagcagcctcagttgcatccggatgttagaactgaatgtgagtctggcaccacttcctgggaaagtgatgatgaggagcaaggacccaccgttcctgcagacaatggtcccattccgtctctagtgggagatgatacattagagaaaggaactggccaagctcttgacagtcatcccactatgaaggatcctgtaaatgtgacccccagttccacacctgaatcctcaccgactgattgcctgcagaacagagcatttgatgacgaattagggcttggtggctcatgccctcctatgagggaaagtgatactagacaagaaaacttgaaaaccaaggctctcgtttctaacagttctttgcattggatacccatcccatcgaatgatgaggtagtgaaacagcccaaaccagaatccagagaacacataccatctgttgagccccaggttggagaggagtgggagaaagctgctcccacccctcctgcattgcctggggatttgacagctgaggagggtctagatcctcttgacagccttacttcactctggactgtgccatctcgaggaggcagtgacagcaatggcagttactgtcaacaggtggacattgaaaagctgaaaatcaacggagactctgaagcactgagtcctcacggtgagtccacggatacagcctctgactttgaaggtcacctcacggaggacagcagtgaggctgacactagagaagctgcagtgacaaagggatcttcggtggacaaggatgagaaacccaattggaaccaatctgccccactgtccaaggtgaatggtgacatgcgtctggttacaaggacagatgggatggttgctcctcagagctgggtgtctcgagtatgtgcggtccgccaaaagatcccagattccctactgctggccagtactgagtaccagccaagagccgtgtgcctgtccatgcctgggtcctcagtggaggccactaacccacttgtgatgcagttgctgcagggtagcttgcccctagagaaggttcttccaccagcccacgatgacagcatgtcagaatccccacaagtaccacttacaaaagaccagagccatggctcgctacgcatgggatctttacatggtcttggaaaaaacagtggcatggttgatggaagcagccccagttctttaagggctttgaaggagcctcttctgccagatagctgtgaaacaggcactggtcttgccaggattgaggccacccaggctcctggagcaccccaaaagaattgcaaggcagtcccaagttttgactccctccatccagtgacaaatcccattacatcctctaggaaactggaagaaatggattccaaagagcagttctcttcctttagttgtgaagatcagaaggaagtccgtgctatgtcacaggacagtaattcaaatgctgctccaggaaagagcccaggagatcttactacctcgagaacacctcgtttctcatctccaaatgtgatctcctttggtccagagcagacaggtcgggccctgggtgatcagagcaatgttacaggccaagggaagaagctttttggctctgggaatgtggctgcaacccttcagcgccccaggcctgcggacccgatgcctcttcctgctgagatccctccagtttttcccagtgggaagttgggaccaagcacaaactccatgtctggtggggtacagactccaagggaagactgggctccaaagccacatgcctttgttggcagcgtcaagaatgagaagacttttgtggggggtcctcttaaggcaaatgccgagaacaggaaagctactgggcatagtcccctggaactggtgggtcacttggaagggatgccctttgtcatggacttgcccttctggaaattaccccgagagccagggaaggggctcagtgagcctctggagccttcttctctcccctcccaactcagcatcaagcaggcattttatgggaagctttctaaactccaactgagttccaccagctttaattattcctctagctctcccacctttcccaaaggccttgctggaagtgtggtgcagctgagccacaaagcaaactttggtgcgagccacagtgcatcactttccttgcaaatgttcactgacagcagcacggtggaaagcatctcgctccagtgtgcgtgcagcctgaaagccatgatcatgtgccaaggctgcggtgcgttctgtcacgatgactgtattggaccctcaaagctctgtgtattgtgccttgtggtgagataataaattatggccatgggaaacattgtatatttagtgtgtgtattttgataatgattgatcttaaatctgtatacagaatatcattgatataatactctttaggcaggagcactcttgccttcccccaaaatttacactgctaaagccctctgtcacttggcgacccttctggtcttgctggaggggtttcctgggtataacccattgggctgcccaaggccagccagcctgagctctcctgcaagacagagcctgatgtggcacggagtggggttgcggggggtggggggactgcctgactcccagagggacttgaaactgaagcaagaaggttgcattctccaccaagggagttaacctacctgaactaagtagaaatgccagtcttccactaccccctccctgccatcttttcttctgctactttggggagttgatggccaggaaagaagccagcacagggttaaagtaactcctggcattgcccaccagggggctggtgcacctgctgacctcagggtcacagttgagtcatttgccagttgacggagca

SEQ ID NO: 294 - DNA, 6666 bp, Homo sapiens
  source 1..6666: mol_type = genomic DNA
aaattccggcggaggggcgagctggcaggccggctcctcccactctgggcagcggggtcccgcgtcccctcccccactatttggcagcgtctgggggtctggggcagcttcgttcattcacccgggggagttgggtttccgggaagggtcggaagctcctccctcgcttcctggtgggtaatggggtggtgcctttgactccgggggtggaaaagcgaccccacattcaaggacgccaatggcatgttgagctttcccaatctaaaccaggtattagaaaactactcggatgctccaatgacaccaaaacagattctgcaggtcatagaggcagaaggactaaaggaaatgagaagtgggacttcccctctcgcatgcctcaatgctatgctacattccaattcaagaggaggagaggggttgttttataaactgcctggccgaatcagccttttcacgctcaagaaggatgccctgcagtggtctcgccatccagctacagtggagggagaggagccagaggacacggctgatgtggagagctgtgggtctaatgaagccagcactgtgagtggtgaaaacgatgtatctcttgatgaaacatcttcgaacgcatcctgttctacagaatctcagagtcgacctctttccaatcccagggacagctacagagcttcctcacaggcgaacaaacaaaagaaaaagactggggtgatgctgcctcgagttgtcctgactcctctgaaggtaaacggggcccacgtggaatctgcatcaggtcaaatgaagcgcaacagaggggaagaaatagattttgagacacctgggtccattcttgtcaacaccaacctccgtgccctgatcaactctcggaccttccatgccttaccatcacacttccagcagcagctcctcttcctcctgcctgaagtagacagacaggtggggacggatggcctgttgcgtctcagcagcagtgcactaaataacgagttttttacccatgcggctcagagctggcgggagcgcctggctgatggtgaatttactcatgagatgcaagtcaggatacgacaggaaatggagaaggaaaagaaggtggaacaatggaaagaaaagttctttgaagactactatggacagaagctgggtttgaccaaagaagagtcattgcagcagaacgtgggccaggaggaggctgaaatcaaaagtggcttgtgtgtcccaggagaatcagtgcgtatacagcgtggtccagccacccgacagcgagatgggcattttaagaaacgctctcggccagatctccgaaccagagccagaaggaatctgtacaaaaaacaggagtcagaacaagcaggggttgctaaggatgcaaaatctgtggcctcagatgttcccctctacaaggatggggaggctaagactgacccagcagggctgagcagtccccatctgccaggcacatcctctgcagcacccgacctggagggtcccgaattcccagttgagtctgtggcttctcggatccaggctgagccagacaacttggcacgtgcctctgcatctccagacagaattcctagcctgcctcaggaaactgtggatcaggaacccaaggatcagaagaggaaatcctttgagcaggcggcctctgcatcctttcccgaaaagaagccccggcttgaagatcgtcagtcctttcgtaacacaattgaaagtgttcacaccgaaaagccacagcccactaaagaggagcccaaagtcccgcccatccggattcaactttcacgtatcaaaccaccctgggtggttaaaggtcagcccacttaccagatatgcccccggatcatccccaccacggagtcctcctgccggggttggactggcgccaggaccctcgcagacattaaagcccgtgctctgcaggtccgaggggcgagaggtcaccactgccatagagaggcggccaccactgccatcggaggggggggtggcccgggtggaggtggcggcggggccaccgatgagggaggtggcagaggcagcagcagtggtgatggtggtgaggcctgtggccaccctgagcccaggggaggcccgagcacccctggaaagtgtacgtcagatctacagcgaacacaactactgccgccttatcctctaaatggggagcatacccaggccggaactgccatgtccagagctaggagagaggacctgccttctctgagaaaggaggaaagctgcctactacagagggctacagttggactcacagatgggctaggagatgcctcccaactccccgttgctcccactggggaccagccatgccaggccttgcccctactgtcctcccaaacctcagtagctgagagattagtggagcagcctcagttgcatccggatgttagaactgaatgtgagtctggcaccacttcctgggaaagtgatgatgaggagcaaggacccaccgttcctgcagacaatggtcccattccgtctctagtgggagatgatacattagagaaaggaactggccaagctcttgacagtcatcccactatgaaggatcctgtaaatgtgacccccagttccacacctgaatcctcaccgactgattgcctgcagaacagagcatttgatgacgaattagggcttggtggctcatgccctcctatgagggaaagtgatactagacaagaaaacttgaaaaccaaggctctcgtttctaacagttctttgcattggatacccatcccatcgaatgatgaggtagtgaaacagcccaaaccagaatccagagaacacataccatctgttgagccccaggttggagaggagtgggagaaagctgctcccacccctcctgcattgcctggggatttgacagctgaggagggtctagatcctcttgacagccttacttcactctggactgtgccatctcgaggaggcagtgacagcaatggcagttactgtcaacaggtggacattgaaaagctgaaaatcaacggagactctgaagcactgagtcctcacggtgagtccacggatacagcctctgactttgaaggtcacctcacggaggacagcagtgaggctgacactagagaagctgcagtgacaaagggatcttcggtggacaaggatgagaaacccaattggaaccaatctgccccactgtccaaggtgaatggtgacatgcgtctggttacaaggacagatgggatggttgctcctcagagctgggtgtctcgagtatgtgcggtccgccaaaagatcccagattccctactgctggccagtactgagtaccagccaagagccgtgtgcctgtccatgcctgggtcctcagtggaggccactaacccacttgtgatgcagttgctgcagggtagcttgcccctagagaaggttcttccaccagcccacgatgacagcatgtcagaatccccacaagtaccacttacaaaagaccagagccatggctcgctacgcatgggatctttacatggtcttggaaaaaacagtggcatggttgatggaagcagccccagttctttaagggctttgaaggagcctcttctgccagatagctgtgaaacaggcactggtcttgccaggattgaggccacccaggctcctggagcaccccaaaagaattgcaaggcagtcccaagttttgactccctccatccagtgacaaatcccattacatcctctaggaaactggaagaaatggattccaaagagcagttctcttcctttagttgtgaagatcagaaggaagtccgtgctatgtcacaggacagtaattcaaatgctgctccaggaaagagcccaggagatcttactacctcgagaacacctcgtttctcatctccaaatgtgatctcctttggtccagagcagacaggtcgggccctgggtgatcagagcaatgttacaggccaagggaagaagctttttggctctgggaatgtggctgcaacccttcagcgccccaggcctgcggacccgatgcctcttcctgctgagatccctccagtttttcccagtgggaagttgggaccaagcacaaactccatgtctggtggggtacagactccaagggaagactgggctccaaagccacatgcctttgttggcagcgtcaagaatgagaagacttttgtggggggtcctcttaaggcaaatgccgagaacaggaaagctactgggcatagtcccctggaactggtgggtcacttggaagggatgccctttgtcatggacttgcccttctggaaattaccccgagagccagggaaggggctcagtgagcctctggagccttcttctctcccctcccaactcagcatcaagcaggcattttatgggaagctttctaaactccaactgagttccaccagctttaattattcctctagctctcccacctttcccaaaggccttgctggaagtgtggtgcagctgagccacaaagcaaactttggtgcgagccacagtgcatcactttccttgcaaatgttcactgacagcagcacggtggaaagcatctcgctccagtgtgcgtgcagcctgaaagccatgatcatgtgccaaggctgcggtgcgttctgtcacgatgactgtattggaccctcaaagctctgtgtattgtgccttgtggtgagataataaattatggccatgggaaacattgtatatttagtgtgtgtattttgataatgattgatcttaaatctgtatacagaatatcattgatataatactctttaggcaggagcactcttgccttcccccaaaatttacactgctaaagccctctgtcacttggcgacccttctggtcttgctggaggggtttcctgggtataacccattgggctgcccaaggccagccagcctgagctctcctgcaagacagagcctgatgtggcacggagtggggttgcggggggtggggggactgcctgactcccagagggacttgaaactgaagcaagaaggttgcattctccaccaagggagttaacctacctgaactaagtagaaatgccagtcttccactaccccctccctgccatcttttcttctgctactttggggagttgatggccaggaaagaagccagcacagggttaaagtaactcctggcattgcccaccagggggctggtgcacctgctgacctcagggtcacagttgagtcatttgccagttgacggagcaagtttgaccttggttctgttgctgaagcaaatttggaacttttctgtctcagtgtgatccactaacccacaggatcatttggaaccttgaatagctctgcttggacaatggggttggggaatagggttgtctttcctatgaaaatgccatctgtagaccttgtgagtcagccgtccagatgtttgcaggtgaattcctctgcttgacatcctccctgtcactttggaccctatgggagtgggcatctccacgcacctgtgtatgtgaaagtcattttacatttcaaagcagtgtgtgtttcttatttttatatttttaactctttattcttggatgtataaagtgaactttttggcttctgtaagtatgctctatgcacctctaatgttttatcatgtatttatatgttgtacacagtactggctgattctgtaaatggatgtattgtacagagaacatgaacgtctcttcctaattttacatcttcagcatcattgcattaaagtggtgtaatctccttctctacatctgttgtcagagccactgagtgctgtgctgctcgacgtgagggtgaaatgattgacttgtgacctgccaggttgcccgatgccctgttgggtcaccggctggacctgctgcagcctgcagagccacagtcagcctgcccacatgccaccgagcaaacgcatcttgcttttcacatctctcctcctacagccttaatggctgcttgctgccatatgtgacaaatcaccaccaccagtgttaagtgcttctggattcatgggtgagttccctgggcagcccccaggaaggccttccagatctggctccagggtcaccacctgtcacagcaatacctgggaccatgctctcctgggactgtgaggctccttttgacgtacttttgacatcaggcaggtttgggaagaaacaaagccatgcctgctcctgcctctctcccaacatgtttccagcaagtagatgcccctgtgtgtgttttcccttgccttgtttcctgccttatatcttgtatttcgacttattacagagttgagggttcttgcttaatttagatcaagtataaaatttgtatgacttcaagtctcattttatctgaaaggtttttttctcatttaatctgatgtggcattttcgtcatctgaagcatgagtgacaagttgggaatgatgtggtgatttagaatgcagtattggccaagtccaagttgtcaacttaagcgtctgtttaccaaagaccgggaacaggggcccaaacatgtccagtcctcttcttccctctgctggaacctttggggacactcaagggtacagtttgacactgatctggtccatgaggctgcccagagaaagcactgcttctgtatgtctcttgtggtattggaacaataaacccgtacaacctgc

SEQ ID NO: 295 - DNA, 495 bp, Homo sapiens
  source 1..495: mol_type = genomic DNA
tgggcagcggggtcccgcgtcccctcccccactatttggcagcgtctgggggtctggggcagcttcgttcattcacccgggggagttgggtttccgggaagggtcggaagctcctccctcgcttcctggtgggtaatggggtggtgcctttgactccgggggtggaaaagcgaccccacattcaaggacgccaatggcatgttgagctttcccaatctaaaccaggtattagaaaactactcggatgctccaatgacaccaaaacagattctgcaggtcatagaggcagaaggactaaaggaaatgagaagtgggacttcccctctcgcatgcctcaatgctatgctacattccaattcaagaggaggagaggggttgttttataaactgcctggccgaatcagccttttcacgctcaaggtgtgagccactgcaccaggccccttcatcttaattttaatatatctttgaataaacaccattgtatgaacctgc

SEQ ID NO: 296 - DNA, 812 bp, Homo sapiens
  source 1..812: mol_type = genomic DNA
cagactgggctgtttgccttcagaagctggactggaaattggtattttgaggagaactgaatccactttgcaaagaatgtatgttggacaaagacaaagtatctctgttgggagacgttgttcactgaggatttagcaagggagagcgtaacttgagtgtttgaagccgtctcgttcaaccgatgggggttgtgaattttgtgttcagagcgtcagaggacttgcaggtattagaaaactactcggatgctccaatgacaccaaaacagattctgcaggtcatagaggcagaaggactaaaggaaatgagaagtgggacttcccctctcgcatgcctcaatgctatgctacattccaattcaagaggaggagaggggttgttttataaactgcctggccgaatcagccttttcacgctcaaggtgtgagccactgcaccaggccccttcatcttaattttaatatatctttgaataaacaccattgtatgaacctgctgtaagcttgggagtggtctgttagtctacagcttgtgtctgagatgtgctaattgaatatttgctcagtacctcatcttaactgcctttggctttatgttgcttatccttcatagtatcttgttcattggccttttacatccataggcatcacttctctgatattcgttgtgctcttttaatggattaatggtttgcttggttggttcctctagttagactgtaaactccttgagagcagagtctgtattttattaattacccacagtactaggtacatagttgccttcaataaatatatatttaatgaacgaa

SEQ ID NO: 297 - DNA, 6591 bp, Homo sapiens
  source 1..6591: mol_type = genomic DNA
atgggggttgtgaattttgtgttcagagcgtcagaggacttgcaggtattagaaaactactcggatgctccaatgacaccaaaacagattctgcaggtcatagaggcagaaggactaaaggaaatgagtgggacttcccctctcgcatgcctcaatgctatgctacattccaattcaagaggaggagaggggttgttttataaactgcctggccgaatcagccttttcacgctcaagaaggatgccctgcagtggtctcgccatccagctacagtggagggagaggagccagaggacacggctgatgtggagagctgtgggtctaatgaagccagcactgtgagtggtgaaaacgatgtatctcttgatgaaacatcttcgaacgcatcctgttctacagaatctcagagtcgacctctttccaatcccagggacagctacagagcttcctcacaggcgaacaaacaaaagaaaaagactggggtgatgctgcctcgagttgtcctgactcctctgaaggtaaacggggcccacgtggaatctgcatcagggttctcgggctgccacgccgatggcgagagcggcagcccgtccagcagcagcagcggctctctggccctgggcagcgctgctattcgtggccaggccgaggtcacccaggaccctgccccgctcctgagaggcttccggaagccagccacaggtcaaatgaagcgcaacagaggggaagaaatagattttgagacacctgggtccattcttgtcaacaccaacctccgtgccctgatcaactctcggaccttccatgccttaccatcacacttccagcagcagctcctcttcctcctgcctgaagtagacagacaggtggggacggatggcctgttgcgtctcagcagcagtgcactaaataacgagttttttacccatgcggctcagagctggcgggagcgcctggctgatggtgaatttactcatgagatgcaagtcaggatacgacaggaaatggagaaggaaaagaaggtggaacaatggaaagaaaagttctttgaagactactatggacagaagctgggtttgaccaaagaagagtcattgcagcagaacgtgggccaggaggaggctgaaatcaaaagtggcttgtgtgtcccaggagaatcagtgcgtatacagcgtggtccagccacccgacagcgagatgggcattttaagaaacgctctcggccagatctccgaaccagagccagaaggaatctgtacaaaaaacaggagtcagaacaagcaggggttgctaaggatgcaaaatctgtggcctcagatgttcccctctacaaggatggggaggctaagactgacccagcagggctgagcagtccccatctgccaggcacatcctctgcagcacccgacctggagggtcccgaattcccagttgagtctgtggcttctcggatccaggctgagccagacaacttggcacgtgcctctgcatctccagacagaattcctagcctgcctcaggaaactgtggatcaggaacccaaggatcagaagaggaaatcctttgagcaggcggcctctgcatcctttcccgaaaagaagccccggcttgaagatcgtcagtcctttcgtaacacaattgaaagtgttcacaccgaaaagccacagcccactaaagaggagcccaaagtcccgcccatccggattcaactttcacgtatcaaaccaccctgggtggttaaaggtcagcccacttaccagatatgcccccggatcatccccaccacggagtcctcctgccggggttggactggcgccaggaccctcgcagacattaaagcccgtgctctgcaggtccgaggggcgagaggtcaccactgccatagagaggcggccaccactgccatcggaggggggggtggcccgggtggaggtggcggcggggccaccgatgagggaggtggcagaggcagcagcagtggtgatggtggtgaggcctgtggccaccctgagcccaggggaggcccgagcacccctggaaagtgtacgtcagatctacagcgaacacaactactgccgccttatcctctaaatggggagcatacccaggccggaactgccatgtccagagctaggagagaggacctgccttctctgagaaaggaggaaagctgcctactacagagggctacagttggactcacagatgggctaggagatgcctcccaactccccgttgctcccactggggaccagccatgccaggccttgcccctactgtcctcccaaacctcagtagctgagagattagtggagcagcctcagttgcatccggatgttagaactgaatgtgagtctggcaccacttcctgggaaagtgatgatgaggagcaaggacccaccgttcctgcagacaatggtcccattccgtctctagtgggagatgatacattagagaaaggaactggccaagctcttgacagtcatcccactatgaaggatcctgtaaatgtgacccccagttccacacctgaatcctcaccgactgattgcctgcagaacagagcatttgatgacgaattagggcttggtggctcatgccctcctatgagggaaagtgatactagacaagaaaacttgaaaaccaaggctctcgtttctaacagttctttgcattggatacccatcccatcgaatgatgaggtagtgaaacagcccaaaccagaatccagagaacacataccatctgttgagccccaggttggagaggagtgggagaaagctgctcccacccctcctgcattgcctggggatttgacagctgaggagggtctagatcctcttgacagccttacttcactctggactgtgccatctcgaggaggcagtgacagcaatggcagttactgtcaacaggtggacattgaaaagctgaaaatcaacggagactctgaagcactgagtcctcacggtgagtccacggatacagcctctgactttgaaggtcacctcacggaggacagcagtgaggctgacactagagaagctgcagtgacaaagggatcttcggtggacaaggatgagaaacccaattggaaccaatctgccccactgtccaaggtgaatggtgacatgcgtctggttacaaggacagatgggatggttgctcctcagagctgggtgtctcgagtatgtgcggtccgccaaaagatcccagattccctactgctggccagtactgagtaccagccaagagccgtgtgcctgtccatgcctgggtcctcagtggaggccactaacccacttgtgatgcagttgctgcagggtagcttgcccctagagaaggttcttccaccagcccacgatgacagcatgtcagaatccccacaagtaccacttacaaaagaccagagccatggctcgctacgcatgggatctttacatggtcttggaaaaaacagtggcatggttgatggaagcagccccagttctttaagggctttgaaggagcctcttctgccagatagctgtgaaacaggcactggtcttgccaggattgaggccacccaggctcctggagcaccccaaaagaattgcaaggcagtcccaagttttgactccctccatccagtgacaaatcccattacatcctctaggaaactggaagaaatggattccaaagagcagttctcttcctttagttgtgaagatcagaaggaagtccgtgctatgtcacaggacagtaattcaaatgctgctccaggaaagagcccaggagatcttactacctcgagaacacctcgtttctcatctccaaatgtgatctcctttggtccagagcagacaggtcgggccctgggtgatcagagcaatgttacaggccaagggaagaagctttttggctctgggaatgtggctgcaacccttcagcgccccaggcctgcggacccgatgcctcttcctgctgagatccctccagtttttcccagtgggaagttgggaccaagcacaaactccatgtctggtggggtacagactccaagggaagactgggctccaaagccacatgcctttgttggcagcgtcaagaatgagaagacttttgtggggggtcctcttaaggcaaatgccgagaacaggaaagctactgggcatagtcccctggaactggtgggtcacttggaagggatgccctttgtcatggacttgcccttctggaaattaccccgagagccagggaaggggctcagtgagcctctggagccttcttctctcccctcccaactcagcatcaagcaggcattttatgggaagctttctaaactccaactgagttccaccagctttaattattcctctagctctcccacctttcccaaaggccttgctggaagtgtggtgcagctgagccacaaagcaaactttggtgcgagccacagtgcatcactttccttgcaaatgttcactgacagcagcacggtggaaagcatctcgctccagtgtgcgtgcagcctgaaagccatgatcatgtgccaaggctgcggtgcgttctgtcacgatgactgtattggaccctcaaagctctgtgtattgtgccttgtggtgagataataaattatggccatgggaaacattgtatatttagtgtgtgtattttgataatgattgatcttaaatctgtatacagaatatcattgatataatactctttaggcaggagcactcttgccttcccccaaaatttacactgctaaagccctctgtcacttggcgacccttctggtcttgctggaggggtttcctgggtataacccattgggctgcccaaggccagccagcctgagctctcctgcaagacagagcctgatgtggcacggagtggggttgcggggggtggggggactgcctgactcccagagggacttgaaactgaagcaagaaggttgcattctccaccaagggagttaacctacctgaactaagtagaaatgccagtcttccactaccccctccctgccatcttttcttctgctactttggggagttgatggccaggaaagaagccagcacagggttaaagtaactcctggcattgcccaccagggggctggtgcacctgctgacctcagggtcacagttgagtcatttgccagttgacggagcaagtttgaccttggttctgttgctgaagcaaatttggaacttttctgtctcagtgtgatccactaacccacaggatcatttggaaccttgaatagctctgcttggacaatggggttggggaatagggttgtctttcctatgaaaatgccatctgtagaccttgtgagtcagccgtccagatgtttgcaggtgaattcctctgcttgacatcctccctgtcactttggaccctatgggagtgggcatctccacgcacctgtgtatgtgaaagtcattttacatttcaaagcagtgtgtgtttcttatttttatatttttaactctttattcttggatgtataaagtgaactttttggcttctgtaagtatgctctatgcacctctaatgttttatcatgtatttatatgttgtacacagtactggctgattctgtaaatggatgtattgtacagagaacatgaacgtctcttcctaattttacatcttcagcatcattgcattaaagtggtgtaatctccttctctacatctgttgtcagagccactgagtgctgtgctgctcgacgtgagggtgaaatgattgacttgtgacctgccaggttgcccgatgccctgttgggtcaccggctggacctgctgcagcctgcagagccacagtcagcctgcccacatgccaccgagcaaacgcatcttgcttttcacatctctcctcctacagccttaatggctgcttgctgccatatgtgacaaatcaccaccaccagtgttaagtgcttctggattcatgggtgagttccctgggcagcccccaggaaggccttccagatctggctccagggtcaccacctgtcacagcaatacctgggaccatgctctcctgggactgtgaggctccttttgacgtacttttgacatcaggcaggtttgggaagaaacaaagccatgcctgctcctgcctctctcccaacatgtttccagcaagtagatgcccctgtgtgtgttttcccttgccttgtttcctgccttatatcttgtatttcgacttattacagagttgagggttcttgcttaatttagatcaagtataaaatttgtatgacttcaagtctcattttatctgaaaggtttttttctcatttaatctgatgtggcattttcgtcatctgaagcatgagtgacaagttgggaatgatgtggtgatttagaatgcagtattggccaagtccaagttgtcaacttaagcgtctgtttaccaaagaccgggaacaggggcccaaacatgtccagtcctcttcttccctctgctggaacctttggggacactcaagggtacagtttgacactgatctggtccatgaggctgcccagagaaagcactgcttctgtatgtctcttgtggtattggaacaataaacccgtacaacctgc

SEQ ID NO: 298 - DNA, 1084 bp, Homo sapiens
  source 1..1084: mol_type = genomic DNA
cacacccacggcagacacgcacgcacccgggcgccgaagggaaagccgcgtctcgccctcccgccccgccgtcggtcctgtctcagtccctcagcagagcgggaaagcggaggccggagccgtgacctctgaccccgtggttatgcggagccgccgcattccttagcgatcgcggggcagccgccgctgccgccgtgggcgactgacgcagcgcgggcgcgtggagccgccgccgcccctcccccaccgccgctctcgcgccagccggtccccgcgtgcccgccccttctccccggccgcacccgagacctcgcgcgccgccgctgccacgcgccccccccaccgccgccgccgccccagccccgcgccaccgccccagcccgcccagcccggaggtcccgcgtggagctgccgccgccgccggggagaaggatgaaggacaaacagaagaagaagaaggagcgcacgtgggccgaggccgcgcgcctggtattagaaaactactcggatgctccaatgacaccaaaacagattctgcaggtcatagaggcagaaggactaaaggaaatgagaagtgggacttcccctctcgcatgcctcaatgctatgctacattccaattcaagaggaggagaggggttgttttataaactgcctggccgaatcagccttttcacgctcaaggtgtgagccactgcaccaggccccttcatcttaattttaatatatctttgaataaacaccattgtatgaacctgctgtaagcttgggagtggtctgttagtctacagcttgtgtctgagatgtgctaattgaatatttgctcagtacctcatcttaactgcctttggctttatgttgcttatccttcatagtatcttgttcattggccttttacatccataggcatcacttctctgatattcgttgtgctcttttaatggattaatggtttgcttggttggttcctctagttagactgtaaactccttgagagcagagtctgtattttattaattacccacagtactaggtacatagttgccttcaataaatatatatttaatgaaaaaaaaaaaaaaaa

SEQ ID NO: 299 - DNA, 1078 bp, Homo sapiens
  source 1..1078: mol_type = genomic DNA
cacggcagacacgcacgcacccgggcgccgaagggaaagccgcgtctcgccctcccgccccgccgtcggtcctgtctcagtccctcagcagagcgggaaagcggaggccggagccgtgacctctgaccccgtggttatgcggagccgccgcattccttagcgatcgcggggcagccgccgctgccgccgtgggcgactgacgcagcgcgggcgcgtggagccgccgccgcccctcccccaccgccgctctcgcgccagccggtccccgcgtgcccgccccttctccccggccgcacccgagacctcgcgcgccgccgctgccacgcgccccccccaccgccgccgccgccccagccccgcgccaccgccccagcccgcccagcccggaggtcccgcgtggagctgccgccgccgccggggagaaggatgaaggacaaacagaagaagaagaaggagcgcacgtgggccgaggccgcgcgcctggtattagaaaactactcggatgctccaatgacaccaaaacagattctgcaggtcatagaggcagaaggactaaaggaaatgagaagtgggacttcccctctcgcatgcctcaatgctatgctacattccaattcaagaggaggagaggggttgttttataaactgcctggccgaatcagccttttcacgctcaaggtgtgagccactgcaccaggccccttcatcttaattttaatatatctttgaataaacaccattgtatgaacctgctgtaagcttgggagtggtctgttagtctacagcttgtgtctgagatgtgctaattgaatatttgctcagtacctcatcttaactgcctttggctttatgttgcttatccttcatagtatcttgttcattggccttttacatccataggcatcacttctctgatattcgttgtgctcttttaatggattaatggtttgcttggttggttcctctagttagactgtaaactccttgagagcagagtctgtattttattaattacccacagtactaggtacatagttgccttcaataaatatatatttaatgaaaaaaaaaaaaaaaa

SEQ ID NO: 300 - DNA, 1009 bp, Homo sapiens
  source 1..1009: mol_type = genomic DNA
cacgcacgcacccgggcgccgaagggaaagccgcgtctcgccctcccgccccgccgtcggtcctgtctcagtccctcagcagagcgggaaagcggaggccggagccgtgacctctgaccccgtggttatgcggagccgccgcattccttagcgatcgcggggcagccgccgctgccgccgtgggcgactgacgcagcgcgggcgcgtggagccgccgccgcccctcccccaccgccgctctcgcgccagccggtccccgcgtgcccgccccttctccccggccgcacccgagacctcgcgcgccgccgctgccacgcgccccccccaccgccgccgccgccccagccccgcgccaccgccccagcccgcccagcccggaggtcccgcgtggagctgccgccgccgccggggagaaggatgaaggacaaacagaagaagaagaaggagcgcacgtgggccgaggccgcgcgcctggtattagaaaactactcggatgctccaatgacaccaaaacagattctgcaggtcatagaggcagaaggactaaaggaaatgagtgggacttcccctctcgcatgcctcaatgctatgctacattccaattcaagaggaggagaggggttgttttataaactgcctggccgaatcagccttttcacgctcaagagatgaagtcttgctatgttggttaaactggtctcgaactcctggcctcaggtgatcttcccaccacagcttcacaaagcactgggatggattacagaaggatgccctgcagtggtctcgccatccagctacagtggagggagaggagccagaggacacggctgatgtggagagctgtgggtctaatgaagccagcactgtgagtggtgaaaacgatgtatctcttgatgaaacatcttcgaacgcatcctgttctacagaatctcagagtcgacctctttccaatcccagggacagctacagagcttcctcacaggcgaacaaaaaaaaaaaaaaaaaaaaa

SEQ ID NO: 301 - DNA, 6864 bp, Homo sapiens
  source 1..6864: mol_type = genomic DNA
gggcagccgccgctgccgccgtgggcgactgacgcagcgcgggcgcgtggagccgccgccgcccctcccccaccgccgctctcgcgccagccggtccccgcgtgcccgccccttctccccggccgcacccgagacctcgcgcgccgccgctgccacgcgccccccccaccgccgccgccgccccagccccgcgccaccgccccagcccgcccagcccggaggtcccgcgtggagctgccgccgccgccggggagaaggatgaaggacaaacagaagaagaagaaggagcgcacgtgggccgaggccgcgcgcctggtattagaaaactactcggatgctccaatgacaccaaaacagattctgcaggtcatagaggcagaaggactaaaggaaatgagaagtgggacttcccctctcgcatgcctcaatgctatgctacattccaattcaagaggaggagaggggttgttttataaactgcctggccgaatcagccttttcacgctcaagaaggatgccctgcagtggtctcgccatccagctacagtggagggagaggagccagaggacacggctgatgtggagagctgtgggtctaatgaagccagcactgtgagtggtgaaaacgatgtatctcttgatgaaacatcttcgaacgcatcctgttctacagaatctcagagtcgacctctttccaatcccagggacagctacagagcttcctcacaggcgaacaaacaaaagaaaaagactggggtgatgctgcctcgagttgtcctgactcctctgaaggtaaacggggcccacgtggaatctgcatcagggttctcgggctgccacgccgatggcgagagcggcagcccgtccagcagcagcagcggctctctggccctgggcagcgctgctattcgtggccaggccgaggtcacccaggaccctgccccgctcctgagaggcttccggaagccagccacaggtcaaatgaagcgcaacagaggggaagaaatagattttgagacacctgggtccattcttgtcaacaccaacctccgtgccctgatcaactctcggaccttccatgccttaccatcacacttccagcagcagctcctcttcctcctgcctgaagtagacagacaggtggggacggatggcctgttgcgtctcagcagcagtgcactaaataacgagttttttacccatgcggctcagagctggcgggagcgcctggctgatggtgaatttactcatgagatgcaagtcaggatacgacaggaaatggagaaggaaaagaaggtggaacaatggaaagaaaagttctttgaagactactatggacagaagctgggtttgaccaaagaagagtcattgcagcagaacgtgggccaggaggaggctgaaatcaaaagtggcttgtgtgtcccaggagaatcagtgcgtatacagcgtggtccagccacccgacagcgagatgggcattttaagaaacgctctcggccagatctccgaaccagagccagaaggaatctgtacaaaaaacaggagtcagaacaagcaggggttgctaaggatgcaaaatctgtggcctcagatgttcccctctacaaggatggggagactaagactgacccagcagggctgagcagtccccatctgccaggcacatcctctgcagcacccgacctggagggtcccgaattcccagttgagtctgtggcttctcggatccaggctgagccagacaacttggcacgtgcctctgcatctccagacagaattcctagcctgcctcaggaaactgtggatcaggaacccaaggatcagaagaggaaatcctttgagcaggcggcctctgcatcctttcccgaaaagaagccccggcttgaagatcgtcagtcctttcgtaacacaattgaaagtgttcacaccgaaaagccacagcccactaaagaggagcccaaagtcccgcccatccggattcaactttcacgtatcaaaccaccctgggtggttaaaggtcagcccacttaccagatatgcccccggatcatccccaccacggagtcctcctgccggggttggactggcgccaggaccctcgcagacattaaagcccgtgctctgcaggtccgaggggcgagaggtcaccactgccatagagaggcggccaccactgccatcggaggggggggtggcccgggtggaggtggcggcggggccaccgatgagggaggtggcagaggcagcagcagtggtgatggtggtgaggcctgtggccaccctgagcccaggggaggcccgagcacccctggaaagtgtacgtcagatctacagcgaacacaactactgccgccttatcctctaaatggggagcatacccaggccggaactgccatgtccagagctaggagagaggacctgccttctctgagaaaggaggaaagctgcctactacagagggctacagttggactcacagatgggctaggagatgcctcccaactccccgttgctcccactggggaccagccatgccaggccttgcccctactgtcctcccaaacctcagtagctgagagattagtggagcagcctcagttgcatccggatgttagaactgaatgtgagtctggcaccacttcctgggaaagtgatgatgaggagcaaggacccaccgttcctgcagacaatggtcccattccgtctctagtgggagatgatacattagagaaaggaactggccaagctcttgacagtcatcccactatgaaggatcctgtaaatgtgacccccagttccacacctgaatcctcaccgactgattgcctgcagaacagagcatttgatgacgaattagggcttggtggctcatgccctcctatgagggaaagtgatactagacaagaaaacttgaaaaccaaggctctcgtttctaacagttctttgcattggatacccatcccatcgaatgatgaggtagtgaaacagcccaaaccagaatccagagaacacataccatctgttgagccccaggttggagaggagtgggagaaagctgctcccacccctcctgcattgcctggggatttgacagctgaggagggtctagatcctcttgacagccttacttcactctggactgtgccatctcgaggaggcagtgacagcaatggcagttactgtcaacaggtggacattgaaaagctgaaaatcaacggagactctgaagcactgagtcctcacggtgagtccacggatacagcctctgactttgaaggtcacctcacggaggacagcagtgaggctgacactagagaagctgcagtgacaaagggatcttcggtggacaaggatgagaaacccaattggaaccaatctgccccactgtccaaggtgaatggtgacatgcgtctggttacaaggacagatgggatggttgctcctcagagctgggtgtctcgagtatgtgcggtccgccaaaagatcccagattccctactgctggccagtactgagtaccagccaagagccgtgtgcctgtccatgcctgggtcctcagtggaggccactaacccacttgtgatgcagttgctgcagggtagcttgcccctagagaaggttcttccaccagcccacgatgacagcatgtcagaatccccacaagtaccacttacaaaagaccagagccatggctcgctacgcatgggatctttacatggtcttggaaaaaacagtggcatggttgatggaagcagccccagttctttaagggctttgaaggagcctcttctgccagatagctgtgaaacaggcactggtcttgccaggattgaggccacccaggctcctggagcaccccaaaagaattgcaaggcagtcccaagttttgactccctccatccagtgacaaatcccattacatcctctaggaaactggaagaaatggattccaaagagcagttctcttcctttagttgtgaagatcagaaggaagtccgtgctatgtcacaggacagcaattcaaatgctgctccaggaaagagcccaggagatcttactacctcgagaacacctcgtttctcatctccaaatgtgatctcctttggtccagagcagacaggtcgggccctgggtgatcagagcaatgttacaggccaagggaagaagctttttggctctgggaatgtggctgcaacccttcagcgccccaggcctgcggacccgatgcctcttcctgctgagatccctccagtttttcccagtgggaagttgggaccaagcacaaactccatgtctggtggggtacagactccaagggaagactgggctccaaagccacatgcctttgttggcagcgtcaagaatgagaagacttttgtggggggtcctcttaaggcaaatgccgagaacaggaaagctactgggcatagtcccctggaactggtgggtcacttggaagggatgccctttgtcatggacttgcccttctggaaattaccccgagagccagggaaggggctcagtgagcctctggagccttcttctctcccctcccaactcagcatcaagcaggcattttatgggaagctttctaaactccaactgagttccaccagctttaattattcctctagctctcccacctttcccaaaggccttgctggaagtgtggtgcagctgagccacaaagcaaactttggtgcgagccacagtgcatcactttccttgcaaatgttcactgacagcagcacggtggaaagcatctcgctccagtgtgcgtgcagcctgaaagccatgatcatgtgccaaggctgcggtgcgttctgtcacgatgactgtattggaccctcaaagctctgtgtattgtgccttgtggtgagataataaattatggccatgggaaacgttgtatatttagtgtgtgtattttgataatgattgatcttaaatctgtatacagaatatcattgatacaatactctttaggcaggagcactcttgccttcccccaaaatttacactgctaaagccctctgtcacttggcgacccttctggtcttgctggaggggtttcctgggtataacccattgggctgcccaaggccagccagcctgagctctcctgcaagacagagcctgatgtggcacggagtggggttgcggggggtggggggactgcctgactcccagagggacttgaaactgaagcaagaaggttgcattctccaccaagggagttaacctacctgaactaagtagaaatgccagtcttccactaccccctccctgccatcttttcttctgctactttggggagttgatggccaggaaagaagccagcacagggttaaagtaactcctggcattgcccaccagggggctggtgcacctgctgacctcagggtcacagttgagtcatttgccagttgacggagcaagtttgaccttggttctgttgctgaagcaaatttggaacttttctgtctcagtgtgatccactaacccacaggatcatttggaaccttgaatagctctgcttggacaatggggttggggaatagggttgtctttcctatgaaaatgccatctgtagaccttgtgagtcagccgtccagatgtttgcaggtgaattcctctgcttgacatcctccctgtcactttggaccctatgggagtgggcatctccacgcacctgtgtatgtgaaagtcattttacatttcaaagcagtgtgtgtttcttatttttatatttttaactctttattcttggatgtataaagtgaactttttggcttctgtaagtatgctctatgcacctctaatgttttatcatgtatttatatgttgtacacagtactggctgattctgtaaatggatgtattgtacagagaacatgaacgtctcttcctaattttacatcttcagcatcattgcattaaagtggtgtaatctccttctctacatctgttgtcagagccactgagtgctgtgctgctcgacgtgagggtgaaatgattgacttgtgacctgccaggttgcccgatgccctgttgggtcaccggctggacctgctgcagcctgcagagccacagtcagcctgcccacatgccaccgagcaaacgcatcttgcttttcacatctctcctcctacagccttaatggctgcttgctgccatatgtgacaaatcaccaccaccagtgttaagtgcttctggattcatgggtgagttccctgggcagcccccaggaaggccttccagatctggctccagggtcaccacctgtcacagcaatacctgggaccatgctctcctgggactgtgaggctccttttgacgtacttttgacatcaggcaggtttgggaagaaacaaagccatgcctgctcctgcctctctcccaacatgtttccagcaagtagatgcccctgtgtgtgttttcccttgccttgtttcctgccttatatcttgtatttcgacttattacagagttgagggttcttgcttaatttagatcaagtataaaatttgtatgacttcaagtctcattttatctgaaaggtttttttctcatttaatctgatgtggcattttcgtcatctgaagcatgagtgacaagttgggaatgatgtggtgatttagaatgcagtattggccaagtccaagttgtcaacttaagcgtctgtttaccaaagaccgggaacaggggcccaaacatgtccagtcctcttcttccctctgctggaacctttggggacactcaagggtacagtttgacactgatctggtccatgaggctgcccagagaaagcactgcttctgtatgtctcttgtggtattggaacaataaacccgtacaacctgc

SEQ ID NO: 302 - DNA, 4658 bp, Homo sapiens
  source 1..4658: mol_type = genomic DNA
aaattccggcggaggggcgagctggcaggccggctcctcccactctgggcagcggggtcccgcgtcccctcccccactatttggcagcgtctgggggtctggggcagcttcgttcattcacccgggggagttgggtttccgggaagggtcggaagctcctccctcgcttcctggtgggtaatggggtggtgcctttgactccgggggtggaaaagcgaccccacattcaaggacgccaatggcatgttgagctttcccaatctaaaccaggtattagaaaactactcggatgctccaatgacaccaaaacagattctgcaggtcatagaggcagaaggactaaaggaaatgagaagtgggacttcccctctcgcatgcctcaatgctatgctacattccaattcaagaggaggagaggggttgttttataaactgcctggccgaatcagccttttcacgctcaagaaggatgccctgcagtggtctcgccatccagctacagtggagggagaggagccagaggacacggctgatgtggagagctgtgggtctaatgaagccagcactgtgagtggtgaaaacgatgtatctcttgatgaaacatcttcgaacgcatcctgttctacagaatctcagagtcgacctctttccaatcccagggacagctacagagcttcctcacaggcgaacaaacaaaagaaaaagactggggtgatgctgcctcgagttgtcctgactcctctgaaggtaaacggggcccacgtggaatctgcatcaggtcaaatgaagcgcaacagaggggaagaaatagattttgagacacctgggtccattcttgtcaacaccaacctccgtgccctgatcaactctcggaccttccatgccttaccatcacacttccagcagcagctcctcttcctcctgcctgaagtagacagacaggtggggacggatggcctgttgcgtctcagcagcagtgcactaaataacgagttttttacccatgcggctcagagctggcgggagcgcctggctgatggtgaatttactcatgagatgcaagtcaggatacgacaggaaatggagaaggaaaagaaggtggaacaatggaaagaaaagttctttgaagactactatggacagaagctgggtttgaccaaagaagagtcattgcagcagaacgtgggccaggaggaggctgaaatcaaaagtggcttgtgtgtcccaggagaatcagtgcgtatacagcgtggtccagccacccgacagcgagatgggcattttaagaaacgctctcggccagatctccgaaccagagccagaaggaatctgtacaaaaaacaggagtcagaacaagcaggggttgctaaggatgcaaaatctgtggcctcagatgttcccctctacaaggatggggaggctaagactgacccagcagggctgagcagtccccatctgccaggcacatcctctgcagcacccgacctggagggtcccgaattcccagttgagtctgtggcttctcggatccaggctgagccagacaacttggcacgtgcctctgcatctccagacagaattcctagcctgcctcaggaaactgtggatcaggaacccaaggatcagaagaggaaatcctttgagcaggcggcctctgcatcctttcccgaaaagaagccccggcttgaagatcgtcagtcctttcgtaacacaattgaaagtgttcacaccgaaaagccacagcccactaaggaggagcccaaagtcccgcccatccggattcaactttcacgtatcaaaccaccctgggtggttaaaggtcagcccacttaccagatatgcccccggatcatccccaccacggagtcctcctgccggggttggactggcgccaggaccctcgcagacattaaagcccgtgctctgcaggtccgaggggcgagaggtcaccactgccatagagaggccaccgatgagggaggtggcagaggcagcagcagtggtgatggtggtgaggcctgtggccaccctgagcccaggggaggcccgagcacccctggaaagtgtacgtcagatctacagcgaacacaactactgccgccttatcctctaaatggggagcatacccaggccggaactgccatgtccagagctaggagagaggacctgccttctctgagaaaggaggaaagctgcctactacagagggctacagttggactcacagatgggctaggagatgcctcccaactccccgttgctcccactggggaccagccatgccaggccttgcccctactgtcctcccaaacctcagtagctgagagattagtggagcagcctcagttgcatccggatgttagaactgaatgtgagtctggcaccacttcctgggaaagtgatgatgaggagcaaggacccaccgttcctgcagacaatggtcccattccgtctctagtgggagatgatacattagagaaagaaactggccaagctcttgtcagtcatcccactatgagggatcctgtaaatgtgacccccagttccacacctgaatcctcaccgactgattgcctgcagaacagagcatttgatgacgaattagggcttggtggctcatgccctcctatgagggaaagtgatactagacaagaaaacttgaaaaccaaggctctcgtttctaacagttctttgcattggatacccatcccatcgaatgatgaggtagtgaaacagcccaaaccagaatccagagaacacataccatctgttgagccccaggttggagaggagtgggagaaagctgctcccacccctcctgcattgcctggggatttgacagctgaggagggtctagatcctcttgacagccttacttcactctggactgtgccatctcgaggaggcagtgacagcaatggcagttactgtcaacaggtggacattgaaaagctgaaaatcaacggagactctgaagcactgagtcctcacggtgagtccacggatacagcctctgactttgaaggtcacctcacggaggacagcagtgaggctgacactagagaagctgcagtgacaaagggatcttcggtggacaaggatgagaaacccaattggaaccaatctgccccactgtccaaggtgaatggtgacatgcgtctggttacaaggacagatgggatggttgctcctcagagctgggtgtctcgagtatgtgcggtccgccaaaagatcccagattccctactgctggccagtactgagtaccagccaagagccgtgtgcctgtccatgcctgggtcctcagtggaggccactaacccacttgtgatgcagttgctgcagggtagcttgcccctagagaaggttcttccaccagcccacgatgacagcatgtcagaatccccacaagtaccacttacaaaagaccagagccatggctcgctacgcatgggatctttacatggtcttggaaaaaacagtggcatggttgatggaagcagccccagttctttaagggctttgaaggagcctcttctgccagatagctgtgaaacaggcactggtcttgccaggattgaggccacccaggctcctggagcaccccaaaagaattgcaaggcagtcccaagttttgactccctccatccagtgacaaatcccattacatcctctaggaaactggaagaaatggattccaaagagcagttctcttcctttagttgtgaagatcagaaggaagtccgtgctatgtcacaggacagtaattcaaatgctgctccaggaaagagcccaggagatcttactacctcgagaacacctcgtttctcatctccaaatgtgatctcctttggtccagagcagacaggtcgggccctgggtgatcagagcaatgttacaggccaagggaagaagctttttggctctgggaatgtggctgcaacccttcagcgccccaggcctgcggacccgatgcctcttcctgctgagatccctccagtttttcccagtgggaagttgggaccaagcacaaactccatgtctggtggggtacagactccaagggaagactgggctccaaagccacatgcctttgttggcagcgtcaagaatgagaagacttttgtggggggtcctcttaaggcaaatgccgagaacaggaaagctactgggcatagtcccctggaactggtgggtcacttggaagggatgccctttgtcatggacttgcccttctggaaattaccccgagagccagggaaggggctcagtgagcctctggagccttcttctctcccctcccaactcagcatcaagcaggcattttatgggaagctttctaaactccaactgagttccaccagctttaattattcctctagctctcccacctttcccaaaggccttgctggaagtgtggtgcagctgagccacaaagcaaactttggtgcgagccacagtgcatcactttccttgcaaatgttcactgacagcagcacggtggaaagcatctcgctccagtgtgcgtgcagcctgaaagccatgatcatgtgccaaggctgcggtgcgttctgtcacgatgactgtattggaccctcaaagctctgtgtattgtgccttgtggtgagataataaattatggccatgggaaacattgt

SEQ ID NO: 303 - DNA, 6088 bp, Homo sapiens
  source 1..6088: mol_type = genomic DNA
cctgactcctctgaaggtaaacggggcccacgtggaatctgcatcagggttctcgggctgccacgccgatggcgagagcggcagcccgtccagcagcagcagcggctctctggccctgggcagcgctgctattcgtggccaggccgaggtcacccaggaccctgccccgctcctgagaggcttccggaagccagccacaggtcaaatgaagcgcaacagaggggaagaaatagattttgagacacctgggtccattcttgtcaacaccaacctccgtgccctgatcaactctcggaccttccatgccttaccatcacacttccagcagcagctcctcttcctcctgcctgaagtagacagacaggtggggacggatggcctgttgcgtctcagcagcagtgcactaaataacgagttttttacccatgcggctcagagctggcgggagcgcctggctgatggtgaatttactcatgagatgcaagtcaggatacgacaggaaatggagaaggaaaagaaggtggaacaatggaaagaaaagttctttgaagactactatggacagaagctgggtttgaccaaagaagagtcattgcagcagaacgtgggccaggaggaggctgaaatcaaaagtggcttgtgtgtcccaggagaatcagtgcgtatacagcgtggtccagccacccgacagcgagatgggcattttaagaaacgctctcggccagatctccgaaccagagccagaaggaatctgtacaaaaaacaggagtcagaacaagcaggggttgctaaggatgcaaaatctgtggcctcagatgttcccctctacaaggatggggaggctaagactgacccagcagggctgagcagtccccatctgccaggcacatcctctgcagcacccgacctggagggtcccgaattcccagttgagtctgtggcttctcggatccaggctgagccagacaacttggcacgtgcctctgcatctccagacagaattcctagcctgcctcaggaaactgtggatcaggaacccaaggatcagaagaggaaatcctttgagcaggcggcctctgcatcctttcccgaaaagaagccccggcttgaagatcgtcagtcctttcgtaacacaattgaaagtgttcacaccgaaaagccacagcccactaaagaggagcccaaagtcccgcccatccggattcaactttcacgtatcaaaccaccctgggtggttaaaggtcagcccacttaccagatatgcccccggatcatccccaccacggagtcctcctgccggggttggactggcgccaggaccctcgcagacattaaagcccgtgctctgcaggtccgaggggcgagaggtcaccactgccatagagaggcggccaccactgccatcggaggggggggtggcccgggtggaggtggcggcggggccaccgatgagggaggtggcagaggcagcagcagtggtgatggtggtgaggcctgtggccaccctgagcccaggggaggcccgagcacccctggaaagtgtacgtcagatctacagcgaacacaactactgccgccttatcctctaaatggggagcatacccaggccggaactgccatgtccagagctaggagagaggacctgccttctctgagaaaggaggaaagctgcctactacagagggctacagttggactcacagatgggctaggagatgcctcccaactccccgttgctcccactggggaccagccatgccaggccttgcccctactgtcctcccaaacctcagtagctgagagattagtggagcagcctcagttgcatccggatgttagaactgaatgtgagtctggcaccacttcctgggaaagtgatgatgaggagcaaggacccaccgttcctgcagacaatggtcccattccgtctctagtgggagatgatacattagagaaaggaactggccaagctcttgacagtcatcccactatgaaggatcctgtaaatgtgacccccagttccacacctgaatcctcaccgactgattgcctgcagaacagagcatttgatgacgaattagggcttggtggctcatgccctcctatgagggaaagtgatactagacaagaaaacttgaaaaccaaggctctcgtttctaacagttctttgcattggatacccatcccatcgaatgatgaggtagtgaaacagcccaaaccagaatccagagaacacataccatctgttgagccccaggttggagaggagtgggagaaagctgctcccacccctcctgcattgcctggggatttgacagctgaggagggtctagatcctcttgacagccttacttcactctggactgtgccatctcgaggaggcagtgacagcaatggcagttactgtcaacaggtggacattgaaaagctgaaaatcaacggagactctgaagcactgagtcctcacggtgagtccacggatacagcctctgactttgaaggtcacctcacggaggacagcagtgaggctgacactagagaagctgcagtgacaaagggatcttcggtggacaaggatgagaaacccaattggaaccaatctgccccactgtccaaggtgaatggtgacatgcgtctggttacaaggacagatgggatggttgctcctcagagctgggtgtctcgagtatgtgcggtccgccaaaagatcccagattccctactgctggccagtactgagtaccagccaagagccgtgtgcctgtccatgcctgggtcctcagtggaggccactaacccacttgtgatgcagttgctgcagggtagcttgcccctagagaaggttcttccaccagcccacgatgacagcatgtcagaatccccacaagtaccacttacaaaagaccagagccatggctcgctacgcatgggatctttacatggtcttggaaaaaacagtggcatggttgatggaagcagccccagttctttaagggctttgaaggagcctcttctgccagatagctgtgaaacaggcactggtcttgccaggattgaggccacccaggctcctggagcaccccaaaagaattgcaaggcagtcccaagttttgactccctccatccagtgacaaatcccattacatcctctaggaaactggaagaaatggattccaaagagcagttctcttcctttagttgtgaagatcagaaggaagtccgtgctatgtcacaggacagcaattcaaatgctgctccaggaaagagcccaggagatcttactacctcgagaacacctcgtttctcatctccaaatgtgatctcctttggtccagagcagacaggtcgggccctgggtgatcagagcaatgttacaggccaagggaagaagctttttggctctgggaatgtggctgcaacccttcagcgccccaggcctgcggacccgatgcctcttcctgctgagatccctccagtttttcccagtgggaagttgggaccaagcacaaactccatgtctggtggggtacagactccaagggaagactgggctccaaagccacatgcctttgttggcagcgtcaagaatgagaagacttttgtggggggtcctcttaaggcaaatgccgagaacaggaaagctactgggcatagtcccctggaactggtgggtcacttggaagggatgccctttgtcatggacttgcccttctggaaattaccccgagagccagggaaggggctcagtgagcctctggagccttcttctctcccctcccaactcagcatcaagcaggcattttatgggaagctttctaaactccaactgagttccaccagctttaattattcctctagctctcccacctttcccaaaggccttgctggaagtgtggtgcagctgagccacaaagcaaactttggtgcgagccacagtgcatcactttccttgcaaatgttcactgacagcagcacggtggaaagcatctcgctccagtgtgcgtgcagcctgaaagccatgatcatgtgccaaggctgcggtgcgttctgtcacgatgactgtattggaccctcaaagctctgtgtattgtgccttgtggtgagataataaattatggccatgggaaacgttgtatatttagtgtgtgtattttgataatgattgatcttaaatctgtatacagaatatcattgatacaatactctttaggcaggagcactcttgccttcccccaaaatttacactgctaaagccctctgtcacttggcgacccttctggtcttgctggaggggtttcctgggtataacccattgggctgcccaaggccagccagcctgagctctcctgcaagacagagcctgatgtggcacggagtggggttgcggggggtggggggactgcctgactcccagagggacttgaaactgaagcaagaaggttgcattctccaccaagggagttaacctacctgaactaagtagaaatgccagtcttccactgccccctccctgccatcttttcttctgctactttggggagttgatggccaggaaagaagccagcacagggttaaagtaactcctggcattgcccaccagggggctggtgcacctgctgacctcagggtcacagttgagtcatttgccagttgaccgagcaagtttgaccttggttctgttgctgaagcaaatttggaacttttctgtctcagtgtgatccactaacccacaggatcatttggaaccttgaatagctctgcttggacaatggggttggggaatagggttgtctttcctatgaaaatgccatctgtagaccttgtgagtcagccgtccagatgtttgcaggtgaattcctctgcttgacatcctccctgtcactttggaccctatgggagtgggcatctccacgcacctgtgtatgtgaaagtcattttacatttcaaagcagtgtgtgtttcttatttttatatttttaactctttattcttggatgtataaagtgaactttttggcttctgtaagtatgctctatgcacctctaatgttttatcatgtatttatatgttgtacacagtactggctgattctgtaaatggatgtattgtacagagaacatgaacgtctcttcctaattttacatcttcagcatcattgcattaaagtggtgtaatctccttctctacatctgttgtcagagccactgagtgctgtgctgctcgacgtgagggtgaaatgattgacttgtgacctgccaggttgcccgatgccctgttgggtcaccggctggacctgctgcagcctgcagagccacagtcagcctgcccacatgccaccgagcaaacgcatcttgcttttcacatctctcctcctacagccttaatggctgcttgctgccatatgtgacaaatcaccaccaccagtgttaagtgcttctggattcatgggtgagttccctgggcagcccccaggaaggccttccagatctggctccagggtcaccacctgtcacagcaatacctgggaccatgctctcctgggactgtgaggctccttttgacgtacttttgacatcaggcaggtttgggaagaaacaaagccatgcctgctcctgcctctctcccaacatgtttccagcaagtagatgcccctgtgtgtgttttcccttgccttgtttcctgccttatatcttgtatttcgacttattacagagttgagggttcttgcttaatttagatcaagtataaaatttgtatgacttcaagtctcattttatctgaaaggtttttttctcatttaatctgatgtggcattttcgtcatctgaagcatgagtgacaagttgggaatgatgtggtgatttagaatgcagtattggccaagtccaagttgtcaacttaagcgtctgtttaccaaagaccgggaacaggggcccaaacatgtccagtcctcttcttccctctgctggaacctttggggacactcaagggtacagtttgacactgatctggtccatgaggctgcccagagaaagcactgcttctgtatgtctcttgtggtattggaacaataaacccgtacaacctgc

SEQ ID NO: 304 - DNA, 4055 bp, Homo sapiens
  source 1..4055: mol_type = genomic DNA
gcagcccgtccagcagcagcagcggctctctggccctgggcagcgctgctattcgtggccaggccgaggtcacccaggaccctgccccgctcctgagaggcttccggaagccagccacaggtcaaatgaagcgcaacagaggggaagaaatagattttgagacacctgggtccattcttgtcaacaccaacctccgtgccctgatcaactctcggaccttccatgccttaccatcacacttccagcagcagctcctcttcctcctgcctgaagtagacagacaggtggggacggatggcctgttgcgtctcagcagcagtgcactaaataacgagttttttacccatgcggctcagagctggcgggagcgcctggctgatggtgaatttactcatgagatgcaagtcaggatacgacaggaaatggagaaggaaaagaaggtggaacaatggaaagaaaagttctttgaagactactatggacagaagctgggtttgaccaaagaagagtcattgcagcagaacgtgggccaggaggaggctgaaatcaaaagtggcttgtgtgtcccaggagaatcagtgcgtatacagcgtggtccagccacccgacagcgagatgggcattttaagaaacgctctcggccagatctccgaaccagagccagaaggaatctgtacaaaaaacaggagtcagaacaagcaggggttgctaaggatgcaaaatctgtggcctcagatgttcccctctacaaggatggggaggctaagactgacccagcagggctgagcagtccccatctgccaggcacatcctctgcagcacccgacctggagggtcccgaattcccagttgagtctgtggcttctcggatccaggctgagccagacaacttggcacgtgcctctgcatctccagacagaattcctagcctgcctcaggaaactgtggatcaggaacccaaggatcagaagaggaaatcctttgagcaggcggcctctgcatcctttcccgaaaagaagccccggcttgaagatcgtcagtcctttcgtaacacaattgaaagtgttcacaccgaaaagccacagcccactaaagaggagcccaaagtcccgcccatccggattcaactttcacgtatcaaaccaccctgggtggttaaaggtcagcccacttaccagatatgcccccggatcatccccaccacggagtcctcctgccggggttggactggcgccaggaccctcgcagacattaaagcccgtgctctgcaggtccgaggggcgagaggtcaccactgccatagagaggcggccaccactgccatcggaggggggggtggcccgggtggaggtggcggcggggccaccgatgagggaggtggcagaggcagcagcagtggtgatggtggtgaggcctgtggccaccctgagcccaggggaggcccgagcacccctggaaagtgtacgtcagatctacagcgaacacaactactgccgccttatcctctaaatggggagcatacccaggccggaactgccatgtccagagctaggagagaggacctgccttctctgagaaaggaggaaagctgcctactacagagggctacagttggactcacagatgggctaggagatgcctcccaactccccgttgctcccactggggaccagccatgccaggccttgcccctactgtcctcccaaacctcagtagctgagagattagtggagcagcctcagttgcatccggatgttagaactgaatgtgagtctggcaccacttcctgggaaagtgatgatgaggagcaaggacccaccgttcctgcagacaatggtcccattccgtctctagtgggagatgatacattagagaaaggaactggccaagctcttgacagtcatcccactatgaaggatcctgtaaatgtgacccccagttccacacctgaatcctcaccgactgattgcctgcagaacagagcatttgatgacgaattagggcttggtggctcatgccctcctatgagggaaagtgatactagacaagaaaacttgaaaaccaaggctctcgtttctaacagttctttgcattggatacccatcccatcgaatgatgaggtagtgaaacagcccaaaccagaatccagagaacacataccatctgttgagccccaggttggagaggagtgggagaaagctgctcccacccctcctgcattgcctggggatttgacagctgaggagggtctagatcctcttgacagccttacttcactctggactgtgccatctcgaggaggcagtgacagcaatggcagttactgtcaacaggtggacattgaaaagctgaaaatcaacggagactctgaagcactgagtcctcacggtgagtccacggatacagcctctgactttgaaggtcacctcacggaggacagcagtgaggctgacactagagaagctgcagtgacaaagggatcttcggtggacaaggatgagaaacccaattggaaccaatctgccccactgtccaaggtgaatggtgacatgcgtctggttacaaggacagatgggatggttgctcctcagagctgggtgtctcgagtatgtgcggtccgccaaaagatcccagattccctactgctggccagtactgagtaccagccaagagccgtgtgcctgtccatgcctgggtcctcagtggatgccactaacccacttgtgatgcagttgctgcagggtagcttgcccctagagaaggttcttccaccagcccacgatgacagcatgtcagaatccccacaagtaccacttacaaaagaccagagccatggctcgctacgcatgggatctttacatggtcttggaaaaaacagtggcatggttgatggaagcagccccagttctttaagggctttgaaggagcctcttctgccagatagctgtgaaacaggcactggtcttgccaggattgaggccacccaggctcctggagcaccccaaaagaattgcaaggcagtcccaagttttgactccctccatccagtgacaaatcccattacatcctctaggaaactggaagaaatggattccaaagagcagttctcttcctttagttgtgaagatcagaaggaagtccgtgctatgtcacaggacagtaattcaaatgctgctccaggaaagagcccaggagatcttactacctcgagaacacctcgtttctcatctccaaatgtgatctcctttggtccagagcagacaggtcgggccctgggtgatcagagcaatgttacaggccaagggaagaagctttttggctctgggaatgtggctgcaacccttcagcgccccaggcctgcggacccgatgcctcttcctgctgagatccctccagtttttcccagtgggaagttgggaccaagcacaaactccatgtctggtggggtacagactccaagggaagactgggctccaaagccacatgcctttgttggcagcgtcaagaatgagaagacttttgtggggggtcctcttaaggcaaatgccgagaacaggaaagctactgggcatagtcccctggaactggtgggtcacttggaagggatgccctttgtcatggacttgcccttctggaaattaccccgagagccagggaaggggctcagtgagcctctggagccttcttctctcccctcccaactcagcatcaagcaggcattttatgggaagctttctaaactccaactgagttccaccagctttaattattcctctagctctcccacctttcccaaaggccttgctggaagtgtggtgcagctgagccacaaagcaaactttggtgcgagccacagtgcatcactttccttgcaaatgttcactgacagcagcacggtggaaagcatctcgctccagtgtgcgtgcagcctgaaagccatgatcatgtgccaaggctgcggtgcgttctgtcacgatgactgtattggaccctcaaagctctgtgtattgtgccttgtggtgagataataaattatggccatgggaaaaaaaaaa

SEQ ID NO: 305 - DNA, 7031 bp, Homo sapiens
  source 1..7031: mol_type = genomic DNA
cggcagacacgcacgcacccgggcgccgaagggaaagccgcgtctcgccctcccgccccgccgtcggtcctgtctcagtccctcagcagagcgggaaagcggaggccggagccgtgacctctgaccccgtggttatgcggagccgccgcattccttagcgatcgcggggcagccgccgctgccgccgtgggcgactgacgcagcgcgggcgcgtggagccgccgccgcccctcccccaccgccgctctcgcgccagccggtccccgcgtgcccgccccttctccccggccgcacccgagacctcgcgcgccgccgctgccacgcgccccccccaccgccgccgccgccccagccccgcgccaccgccccagcccgcccagcccggaggtcccgcgtggagctgccgccgccgccggggagaaggatgaaggacaaacagaagaagaagaaggagcgcacgtgggccgaggccgcgcgcctggtattagaaaactactcggatgctccaatgacaccaaaacagattctgcaggtcatagaggcagaaggactaaaggaaatgagaagtgggacttcccctctcgcatgcctcaatgctatgctacattccaattcaagaggaggagaggggttgttttataaactgcctggccgaatcagccttttcacgctcaagaaggatgccctgcagtggtctcgccatccagctacagtggagggagaggagccagaggacacggctgatgtggagagctgtgggtctaatgaagccagcactgtgagtggtgaaaacgatgtatctcttgatgaaacatcttcgaacgcatcctgttctacagaatctcagagtcgacctctttccaatcccagggacagctacagagcttcctcacaggcgaacaaacaaaagaaaaagactggggtgatgctgcctcgagttgtcctgactcctctgaaggtaaacggggcccacgtggaatctgcatcagggttctcgggctgccacgccgatggcgagagcggcagcccgtccagcagcagcagcggctctctggccctgggcagcgctgctattcgtggccaggccgaggtcacccaggaccctgccccgctcctgagaggcttccggaagccagccacaggtcaaatgaagcgcaacagaggggaagaaatagattttgagacacctgggtccattcttgtcaacaccaacctccgtgccctgatcaactctcggaccttccatgccttaccatcacacttccagcagcagctcctcttcctcctgcctgaagtagacagacaggtggggacggatggcctgttgcgtctcagcagcagtgcactaaataacgagttttttacccatgcggctcagagctggcgggagcgcctggctgatggtgaatttactcatgagatgcaagtcaggatacgacaggaaatggagaaggaaaagaaggtggaacaatggaaagaaaagttctttgaagactactatggacagaagctgggtttgaccaaagaagagtcattgcagcagaacgtgggccaggaggaggctgaaatcaaaagtggcttgtgtgtcccaggagaatcagtgcgtatacagcgtggtccagccacccgacagcgagatgggcattttaagaaacgctctcggccagatctccgaaccagagccagaaggaatctgtacaaaaaacaggagtcagaacaagcaggggttgctaaggatgcaaaatctgtggcctcagatgttcccctctacaaggatggggaggctaagactgacccagcagggctgagcagtccccatctgccaggcacatcctctgcagcacccgacctggagggtcccgaattcccagttgagtctgtggcttctcggatccaggctgagccagacaacttggcacgtgcctctgcatctccagacagaattcctagcctgcctcaggaaactgtggatcaggaacccaaggatcagaagaggaaatcctttgagcaggcggcctctgcatcctttcccgaaaagaagccccggcttgaagatcgtcagtcctttcgtaacacaattgaaagtgttcacaccgaaaagccacagcccactaaagaggagcccaaagtcccgcccatccggattcaactttcacgtatcaaaccaccctgggtggttaaaggtcagcccacttaccagatatgcccccggatcatccccaccacggagtcctcctgccggggttggactggcgccaggaccctcgcagacattaaagcccgtgctctgcaggtccgaggggcgagaggtcaccactgccatagagaggcggccaccactgccatcggaggggggggtggcccgggtggaggtggcggcggggccaccgatgagggaggtggcagaggcagcagcagtggtgatggtggtgaggcctgtggccaccctgagcccaggggaggcccgagcacccctggaaagtgtacgtcagatctacagcgaacacaactactgccgccttatcctctaaatggggagcatacccaggccggaactgccatgtccagagctaggagagaggacctgccttctctgagaaaggaggaaagctgcctactacagagggctacagttggactcacagatgggctaggagatgcctcccaactccccgttgctcccactggggaccagccatgccaggccttgcccctactgtcctcccaaacctcagtagctgagagattagtggagcagcctcagttgcatccggatgttagaactgaatgtgagtctggcaccacttcctgggaaagtgatgatgaggagcaaggacccaccgttcctgcagacaatggtcccattccgtctctagtgggagatgatacattagagaaaggaactggccaagctcttgacagtcatcccactatgaaggatcctgtaaatgtgacccccagttccacacctgaatcctcaccgactgattgcctgcagaacagagcatttgatgacgaattagggcttggtggctcatgccctcctatgagggaaagtgatactagacaagaaaacttgaaaaccaaggctctcgtttctaacagttctttgcattggatacccatcccatcgaatgatgaggtagtgaaacagcccaaaccagaatccagagaacacataccatctgttgagccccaggttggagaggagtgggagaaagctgctcccacccctcctgcattgcctggggatttgacagctgaggagggtctagatcctcttgacagccttacttcactctggactgtgccatctcgaggaggcagtgacagcaatggcagttactgtcaacaggtggacattgaaaagctgaaaatcaacggagactctgaagcactgagtcctcacggtgagtccacggatacagcctctgactttgaaggtcacctcacggaggacagcagtgaggctgacactagagaagctgcagtgacaaagggatcttcggtggacaaggatgagaaacccaattggaaccaatctgccccactgtccaaggtgaatggtgacatgcgtctggttacaaggacagatgggatggttgctcctcagagctgggtgtctcgagtatgtgcggtccgccaaaagatcccagattccctactgctggccagtactgagtaccagccaagagccgtgtgcctgtccatgcctgggtcctcagtggaggccactaacccacttgtgatgcagttgctgcagggtagcttgcccctagagaaggttcttccaccagcccacgatgacagcatgtcagaatccccacaagtaccacttacaaaagaccagagccatggctcgctacgcatgggatctttacatggtcttggaaaaaacagtggcatggttgatggaagcagccccagttctttaagggctttgaaggagcctcttctgccagatagctgtgaaacaggcactggtcttgccaggattgaggccacccaggctcctggagcaccccaaaagaattgcaaggcagtcccaagttttgactccctccatccagtgacaaatcccattacatcctctaggaaactggaagaaatggattccaaagagcagttctcttcctttagttgtgaagatcagaaggaagtccgtgctatgtcacaggacagtaattcaaatgctgctccaggaaagagcccaggagatcttactacctcgagaacacctcgtttctcatctccaaatgtgatctcctttggtccagagcagacaggtcgggccctgggtgatcagagcaatgttacaggccaagggaagaagctttttggctctgggaatgtggctgcaacccttcagcgccccaggcctgcggacccgatgcctcttcctgctgagatccctccagtttttcccagtgggaagttgggaccaagcacaaactccatgtctggtggggtacagactccaagggaagactgggctccaaagccacatgcctttgttggcagcgtcaagaatgagaagacttttgtggggggtcctcttaaggcaaatgccgagaacaggaaagctactgggcatagtcccctggaactggtgggtcacttggaagggatgccctttgtcatggacttgcccttctggaaattaccccgagagccagggaaggggctcagtgagcctctggagccttcttctctcccctcccaactcagcatcaagcaggcattttatgggaagctttctaaactccaactgagttccaccagctttaattattcctctagctctcccacctttcccaaaggccttgctggaagtgtggtgcagctgagccacaaagcaaactttggtgcgagccacagtgcatcactttccttgcaaatgttcactgacagcagcacggtggaaagcatctcgctccagtgtgcgtgcagcctgaaagccatgatcatgtgccaaggctgcggtgcgttctgtcacgatgactgtattggaccctcaaagctctgtgtattgtgccttgtggtgagataataaattatggccatgggaaacattgtatatttagtgtgtgtattttgataatgattgatcttaaatctgtatacagaatatcattgatataatactctttaggcaggagcactcttgccttcccccaaaatttacactgctaaagccctctgtcacttggcgacccttctggtcttgctggaggggtttcctgggtataacccattgggctgcccaaggccagccagcctgagctctcctgcaagacagagcctgatgtggcacggagtggggttgcggggggtggggggactgcctgactcccagagggacttgaaactgaagcaagaaggttgcattctccaccaagggagttaacctacctgaactaagtagaaatgccagtcttccactaccccctccctgccatcttttcttctgctactttggggagttgatggccaggaaagaagccagcacagggttaaagtaactcctggcattgcccaccagggggctggtgcacctgctgacctcagggtcacagttgagtcatttgccagttgacggagcaagtttgaccttggttctgttgctgaagcaaatttggaacttttctgtctcagtgtgatccactaacccacaggatcatttggaaccttgaatagctctgcttggacaatggggttggggaatagggttgtctttcctatgaaaatgccatctgtagaccttgtgagtcagccgtccagatgtttgcaggtgaattcctctgcttgacatcctccctgtcactttggaccctatgggagtgggcatctccacgcacctgtgtatgtgaaagtcattttacatttcaaagcagtgtgtgtttcttatttttatatttttaactctttattcttggatgtataaagtgaactttttggcttctgtaagtatgctctatgcacctctaatgttttatcatgtatttatatgttgtacacagtactggctgattctgtaaatggatgtattgtacagagaacatgaacgtctcttcctaattttacatcttcagcatcattgcattaaagtggtgtaatctccttctctacatctgttgtcagagccactgagtgctgtgctgctcgacgtgagggtgaaatgattgacttgtgacctgccaggttgcccgatgccctgttgggtcaccggctggacctgctgcagcctgcagagccacagtcagcctgcccacatgccaccgagcaaacgcatcttgcttttcacatctctcctcctacagccttaatggctgcttgctgccatatgtgacaaatcaccaccaccagtgttaagtgcttctggattcatgggtgagttccctgggcagcccccaggaaggccttccagatctggctccagggtcaccacctgtcacagcaatacctgggaccatgctctcctgggactgtgaggctccttttgacgtacttttgacatcaggcaggtttgggaagaaacaaagccatgcctgctcctgcctctctcccaacatgtttccagcaagtagatgcccctgtgtgtgttttcccttgccttgtttcctgccttatatcttgtatttcgacttattacagagttgagggttcttgcttaatttagatcaagtataaaatttgtatgacttcaagtctcattttatctgaaaggtttttttctcatttaatctgatgtggcattttcgtcatctgaagcatgagtgacaagttgggaatgatgtggtgatttagaatgcagtattggccaagtccaagttgtcaacttaagcgtctgtttaccaaagaccgggaacaggggcccaaacatgtccagtcctcttcttccctctgctggaacctttggggacactcaagggtacagtttgacactgatctggtccatgaggctgcccagagaaagcactgcttctgtatgtctcttgtggtattggaacaataaacccgtacaacctgca

SEQ ID NO: 306 - DNA, 296 bp, Homo sapiens
  source 1..296: mol_type = genomic DNA
gtgggccgaggccgcgcgcctggtattagaaaactactcggatgctccaatgacaccaaaacagattctgcaggtcatagaggcagaaggactaaaggaaatgagaagtgggacttcccctctcgcatgcctcaatgctatgctacattccaattcaagaggaggagaggggttgttttataaactgcctggccgaatcagccttttcacgctcaaggtgtgagccactgcaccaggccccttcatcttaattttaatatatctttgaataaacaccattgtatgaacctgctgta

SEQ ID NO: 307 - DNA, 1034 bp, Homo sapiens
  source 1..1034: mol_type = genomic DNA
aattttctctcttattttgaagtgagttttctgcttcaaaggtgttgtgcaaaaaaaaaaaaaatagactgtattgggggggttgacacaaacctgaagtacacctttttctttctcgaagtctgtaaaagttacagatttataaaaactgaaggaatttgggctacagaattttcattggtgcttgctatcctcttccctagtcatttgttgcccagggaacaaaaatagcaattgtttgtatgctgaagttttgtgcttcagtttattttggcctggcatgtgaagtttgaagattttgaggttccgaaatattttttttctgattgagtcaaaattggaagcttgggctagttttcaggatcttgtagaaatttcaggatttctctaacggttctgcacctggaaacaaatataggcctgatggggagtgggagagagctctcgttctcctcctcgacaatgagttttgtgtgttcattgacattctccttggcgttcctgttatgcgggtgtttatgaccctgggcacccaaggaaatttgcttgccagagttttacttgttagagtctctttagattctcgaatttaccgtggtctgaacttcaacatcgaggttgctatttctgttttatcattgactcaacttcaagccaggttatcagggtattagaaaactactcggatgctccaatgacaccaaaacagattctgcaggtcatagaggcagaaggactaaaggaaatgagaagtgggacttcccctctcgcatgcctcaatgctatgctacattccaattcaagaggaggagaggggttgttttataaactgcctggccgaatcagccttttcacgctcaagagatgaagtcttgctatgttggttaaactggtctcaaactcctggcctcaagtgatcttcccaccacagcttcacaaagcactgggatggattacaggtgtgagccactgcaccaggccccttcatcttaattttaatatatctttgaataaacaccattgtatgaacctgc

SEQ ID NO: 308 - protein, 625 aa, Homo sapiens
MKDKQKKKKERTWAEAARLVLENYSDAPMTPKQILQVIEAEGLKEMRSGTSPLACLNAMLHSNSRGGEGLFYKLPGRISLFTLKKDALQWSRHPATVEGEEPEDTADVESCGSNEASTVSGENDVSLDETSSNASCSTESQSRPLSNPRDSYRASSQANKQKKKTGVMLPRVVLTPLKVNGAHVESASGFSGCHADGESGSPSSSSSGSLALGSAAIRGQAEVTQDPAPLLRGFRKPATGQMKRNRGEEIDFETPGSILVNTNLRALINSRTFHALPSHFQQQLLFLLPEVDRQVGTDGLLRLSSSALNNEFFTHAAQSWRERLADGEFTHEMQVRIRQEMEKEKKVEQWKEKFFEDYYGQKLGLTKEESLQQNVGQEEAEIKSGLCVPGESVRIQRGPATRQRDGHFKKRSRPDLRTRARRNLYKKQESEQAGVAKDAKSVASDVPLYKDGEAKTDPAGLSSPHLPGTSSAAPDLEGPEFPVESVASRIQAEPDNLARASASPDRIPSLPQETVDQEPKDQKRKSFEQAASASFPEKKPRLEDRQSFRNTIESVHTEKPQPTKEEPKVPPIRIQLSRIKPPWVVKGQPTYQICPRIIPTTESSCRGWTGARTLADIKARALQSH

SEQ ID NO: 309 - protein, 1541 aa, Homo sapiens
MKDKQKKKKERTWAEAARLVLENYSDAPMTPKQILQVIEAEGLKEMRSGTSPLACLNAMLHSNSRGGEGLFYKLPGRISLFTLKKDALQWSRHPATVEGEEPEDTADVESCGSNEASTVSGENDVSLDETSSNASCSTESQSRPLSNPRDSYRASSQANKQKKKTGVMLPRVVLTPLKVNGAHVESASGFSGCHADGESGSPSSSSSGSLALGSAAIRGQAEVTQDPAPLLRGFRKPATGQMKRNRGEEIDFETPGSILVNTNLRALINSRTFHALPSHFQQQLLFLLPEVDRQVGTDGLLRLSSSALNNEFFTHAAQSWRERLADGEFTHEMQVRIRQEMEKEKKVEQWKEKFFEDYYGQKLGLTKEESLQQNVGQEEAEIKSGLCVPGESVRIQRGPATRQRDGHFKKRSRPDLRTRARRNLYKKQESEQAGVAKDAKSVASDVPLYKDGEAKTDPAGLSSPHLPGTSSAAPDLEGPEFPVESVASRIQAEPDNLARASASPDRIPSLPQETVDQEPKDQKRKSFEQAASASFPEKKPRLEDRQSFRNTIESVHTEKPQPTKEEPKVPPIRIQLSRIKPPWVVKGQPTYQICPRIIPTTESSCRGWTGARTLADIKARALQVRGARGHHCHREAATTAIGGGGGPGGGGGGATDEGGGRGSSSGDGGEACGHPEPRGGPSTPGKCTSDLQRTQLLPPYPLNGEHTQAGTAMSRARREDLPSLRKEESCLLQRATVGLTDGLGDASQLPVAPTGDQPCQALPLLSSQTSVAERLVEQPQLHPDVRTECESGTTSWESDDEEQGPTVPADNGPIPSLVGDDTLEKGTGQALDSHPTMKDPVNVTPSSTPESSPTDCLQNRAFDDELGLGGSCPPMRESDTRQENLKTKALVSNSSLHWIPIPSNDEVVKQPKPESREHIPSVEPQVGEEWEKAAPTPPALPGDLTAEEGLDPLDSLTSLWTVPSRGGSDSNGSYCQQVDIEKLKINGDSEALSPHGESTDTASDFEGHLTEDSSEADTREAAVTKGSSVDKDEKPNWNQSAPLSKVNGDMRLVTRTDGMVAPQSWVSRVCAVRQKIPDSLLLASTEYQPRAVCLSMPGSSVEATNPLVMQLLQGSLPLEKVLPPAHDDSMSESPQVPLTKDQSHGSLRMGSLHGLGKNSGMVDGSSPSSLRALKEPLLPDSCETGTGLARIEATQAPGAPQKNCKAVPSFDSLHPVTNPITSSRKLEEMDSKEQFSSFSCEDQKEVRAMSQDSNSNAAPGKSPGDLTTSRTPRFSSPNVISFGPEQTGRALGDQSNVTGQGKKLFGSGNVAATLQRPRPADPMPLPAEIPPVFPSGKLGPSTNSMSGGVQTPREDWAPKPHAFVGSVKNEKTFVGGPLKANAENRKATGHSPLELVGHLEGMPFVMDLPFWKLPREPGKGLSEPLEPSSLPSQLSIKQAFYGKLSKLQLSSTSFNYSSSSPTFPKGLAGSVVQLSHKANFGASHSASLSLQMFTDSSTVESISLQCACSLKAMIMCQGCGAFCHDDCIGPSKLCVLCLVVR

SEQ ID NO: 310 - protein, 85 aa, Homo sapiens
MKDKQKKKKERTWAEAARLVLENYSDAPMTPKQILQVIEAEGLKEMRSGTSPLACLNAMLHSNSRGGEGLFYKLPGRISLFTLKV

SEQ ID NO: 311 - protein, 1480 aa, Homo sapiens
MLSFPNLNQVLENYSDAPMTPKQILQVIEAEGLKEMRSGTSPLACLNAMLHSNSRGGEGLFYKLPGRISLFTLKKDALQWSRHPATVEGEEPEDTADVESCGSNEASTVSGENDVSLDETSSNASCSTESQSRPLSNPRDSYRASSQANKQKKKTGVMLPRVVLTPLKVNGAHVESASGQMKRNRGEEIDFETPGSILVNTNLRALINSRTFHALPSHFQQQLLFLLPEVDRQVGTDGLLRLSSSALNNEFFTHAAQSWRERLADGEFTHEMQVRIRQEMEKEKKVEQWKEKFFEDYYGQKLGLTKEESLQQNVGQEEAEIKSGLCVPGESVRIQRGPATRQRDGHFKKRSRPDLRTRARRNLYKKQESEQAGVAKDAKSVASDVPLYKDGEAKTDPAGLSSPHLPGTSSAAPDLEGPEFPVESVASRIQAEPDNLARASASPDRIPSLPQETVDQEPKDQKRKSFEQAASASFPEKKPRLEDRQSFRNTIESVHTEKPQPTKEEPKVPPIRIQLSRIKPPWVVKGQPTYQICPRIIPTTESSCRGWTGARTLADIKARALQVRGARGHHCHREAATTAIGGGGGPGGGGGGATDEGGGRGSSSGDGGEACGHPEPRGGPSTPGKCTSDLQRTQLLPPYPLNGEHTQAGTAMSRARREDLPSLRKEESCLLQRATVGLTDGLGDASQLPVAPTGDQPCQALPLLSSQTSVAERLVEQPQLHPDVRTECESGTTSWESDDEEQGPTVPADNGPIPSLVGDDTLEKGTGQALDSHPTMKDPVNVTPSSTPESSPTDCLQNRAFDDELGLGGSCPPMRESDTRQENLKTKALVSNSSLHWIPIPSNDEVVKQPKPESREHIPSVEPQVGEEWEKAAPTPPALPGDLTAEEGLDPLDSLTSLWTVPSRGGSDSNGSYCQQVDIEKLKINGDSEALSPHGESTDTASDFEGHLTEDSSEADTREAAVTKGSSVDKDEKPNWNQSAPLSKVNGDMRLVTRTDGMVAPQSWVSRVCAVRQKIPDSLLLASTEYQPRAVCLSMPGSSVEATNPLVMQLLQGSLPLEKVLPPAHDDSMSESPQVPLTKDQSHGSLRMGSLHGLGKNSGMVDGSSPSSLRALKEPLLPDSCETGTGLARIEATQAPGAPQKNCKAVPSFDSLHPVTNPITSSRKLEEMDSKEQFSSFSCEDQKEVRAMSQDSNSNAAPGKSPGDLTTSRTPRFSSPNVISFGPEQTGRALGDQSNVTGQGKKLFGSGNVAATLQRPRPADPMPLPAEIPPVFPSGKLGPSTNSMSGGVQTPREDWAPKPHAFVGSVKNEKTFVGGPLKANAENRKATGHSPLELVGHLEGMPFVMDLPFWKLPREPGKGLSEPLEPSSLPSQLSIKQAFYGKLSKLQLSSTSFNYSSSSPTFPKGLAGSVVQLSHKANFGASHSASLSLQMFTDSSTVESISLQCACSLKAMIMCQGCGAFCHDDCIGPSKLCVLCLVVR

SEQ ID NO: 312 - protein, 75 aa, Homo sapiens
MLSFPNLNQVLENYSDAPMTPKQILQVIEAEGLKEMRSGTSPLACLNAMLHSNSRGGEGLFYKLPGRISLFTLKV

SEQ ID NO: 313 - protein, 81 aa, Homo sapiens
MGVVNFVFRASEDLQVLENYSDAPMTPKQILQVIEAEGLKEMRSGTSPLACLNAMLHSNSRGGEGLFYKLPGRISLFTLKV

SEQ ID NO: 314 - protein, 1536 aa, Homo sapiens
MGVVNFVFRASEDLQVLENYSDAPMTPKQILQVIEAEGLKEMSGTSPLACLNAMLHSNSRGGEGLFYKLPGRISLFTLKKDALQWSRHPATVEGEEPEDTADVESCGSNEASTVSGENDVSLDETSSNASCSTESQSRPLSNPRDSYRASSQANKQKKKTGVMLPRVVLTPLKVNGAHVESASGFSGCHADGESGSPSSSSSGSLALGSAAIRGQAEVTQDPAPLLRGFRKPATGQMKRNRGEEIDFETPGSILVNTNLRALINSRTFHALPSHFQQQLLFLLPEVDRQVGTDGLLRLSSSALNNEFFTHAAQSWRERLADGEFTHEMQVRIRQEMEKEKKVEQWKEKFFEDYYGQKLGLTKEESLQQNVGQEEAEIKSGLCVPGESVRIQRGPATRQRDGHFKKRSRPDLRTRARRNLYKKQESEQAGVAKDAKSVASDVPLYKDGEAKTDPAGLSSPHLPGTSSAAPDLEGPEFPVESVASRIQAEPDNLARASASPDRIPSLPQETVDQEPKDQKRKSFEQAASASFPEKKPRLEDRQSFRNTIESVHTEKPQPTKEEPKVPPIRIQLSRIKPPWVVKGQPTYQICPRIIPTTESSCRGWTGARTLADIKARALQVRGARGHHCHREAATTAIGGGGGPGGGGGGATDEGGGRGSSSGDGGEACGHPEPRGGPSTPGKCTSDLQRTQLLPPYPLNGEHTQAGTAMSRARREDLPSLRKEESCLLQRATVGLTDGLGDASQLPVAPTGDQPCQALPLLSSQTSVAERLVEQPQLHPDVRTECESGTTSWESDDEEQGPTVPADNGPIPSLVGDDTLEKGTGQALDSHPTMKDPVNVTPSSTPESSPTDCLQNRAFDDELGLGGSCPPMRESDTRQENLKTKALVSNSSLHWIPIPSNDEVVKQPKPESREHIPSVEPQVGEEWEKAAPTPPALPGDLTAEEGLDPLDSLTSLWTVPSRGGSDSNGSYCQQVDIEKLKINGDSEALSPHGESTDTASDFEGHLTEDSSEADTREAAVTKGSSVDKDEKPNWNQSAPLSKVNGDMRLVTRTDGMVAPQSWVSRVCAVRQKIPDSLLLASTEYQPRAVCLSMPGSSVEATNPLVMQLLQGSLPLEKVLPPAHDDSMSESPQVPLTKDQSHGSLRMGSLHGLGKNSGMVDGSSPSSLRALKEPLLPDSCETGTGLARIEATQAPGAPQKNCKAVPSFDSLHPVTNPITSSRKLEEMDSKEQFSSFSCEDQKEVRAMSQDSNSNAAPGKSPGDLTTSRTPRFSSPNVISFGPEQTGRALGDQSNVTGQGKKLFGSGNVAATLQRPRPADPMPLPAEIPPVFPSGKLGPSTNSMSGGVQTPREDWAPKPHAFVGSVKNEKTFVGGPLKANAENRKATGHSPLELVGHLEGMPFVMDLPFWKLPREPGKGLSEPLEPSSLPSQLSIKQAFYGKLSKLQLSSTSFNYSSSSPTFPKGLAGSVVQLSHKANFGASHSASLSLQMFTDSSTVESISLQCACSLKAMIMCQGCGAFCHDDCIGPSKLCVLCLVVR

SEQ ID NO: 315 - protein, 84 aa, Homo sapiens
MKDKQKKKKERTWAEAARLVLENYSDAPMTPKQILQVIEAEGLKEMSGTSPLACLNAMLHSNSRGGEGLFYKLPGRISLFTLKR

SEQ ID NO: 316 - protein, 1462 aa, Homo sapiens [sequence omitted]

SEQ ID NO: 317 - protein, 1368 aa, Homo sapiens
LTPLKVNGAHVESASGFSGCHADGESGSPSSSSSGSLALGSAAIRGQAEVTQDPAPLLRGFRKPATGQMKRNRGEEIDFETPGSILVNTNLRALINSRTFHALPSHFQQQLLFLLPEVDRQVGTDGLLRLSSSALNNEFFTHAAQSWRERLADGEFTHEMQVRIRQEMEKEKKVEQWKEKFFEDYYGQKLGLTKEESLQQNVGQEEAEIKSGLCVPGESVRIQRGPATRQRDGHFKKRSRPDLRTRARRNLYKKQESEQAGVAKDAKSVASDVPLYKDGEAKTDPAGLSSPHLPGTSSAAPDLEGPEFPVESVASRIQAEPDNLARASASPDRIPSLPQETVDQEPKDQKRKSFEQAASASFPEKKPRLEDRQSFRNTIESVHTEKPQPTKEEPKVPPIRIQLSRIKPPWVVKGQPTYQICPRIIPTTESSCRGWTGARTLADIKARALQVRGARGHHCHREAATTAIGGGGGPGGGGGGATDEGGGRGSSSGDGGEACGHPEPRGGPSTPGKCTSDLQRTQLLPPYPLNGEHTQAGTAMSRARREDLPSLRKEESCLLQRATVGLTDGLGDASQLPVAPTGDQPCQALPLLSSQTSVAERLVEQPQLHPDVRTECESGTTSWESDDEEQGPTVPADNGPIPSLVGDDTLEKGTGQALDSHPTMKDPVNVTPSSTPESSPTDCLQNRAFDDELGLGGSCPPMRESDTRQENLKTKALVSNSSLHWIPIPSNDEVVKQPKPESREHIPSVEPQVGEEWEKAAPTPPALPGDLTAEEGLDPLDSLTSLWTVPSRGGSDSNGSYCQQVDIEKLKINGDSEALSPHGESTDTASDFEGHLTEDSSEADTREAAVTKGSSVDKDEKPNWNQSAPLSKVNGDMRLVTRTDGMVAPQSWVSRVCAVRQKIPDSLLLASTEYQPRAVCLSMPGSSVEATNPLVMQLLQGSLPLEKVLPPAHDDSMSESPQVPLTKDQSHGSLRMGSLHGLGKNSGMVDGSSPSSLRALKEPLLPDSCETGTGLARIEATQAPGAPQKNCKAVPSFDSLHPVTNPITSSRKLEEMDSKEQFSSFSCEDQKEVRAMSQDSNSNAAPGKSPGDLTTSRTPRFSSPNVISFGPEQTGRALGDQSNVTGQGKKLFGSGNVAATLQRPRPADPMPLPAEIPPVFPSGKLGPSTNSMSGGVQTPREDWAPKPHAFVGSVKNEKTFVGGPLKANAENRKATGHSPLELVGHLEGMPFVMDLPFWKLPREPGKGLSEPLEPSSLPSQLSIKQAFYGKLSKLQLSSTSFNYSSSSPTFPKGLAGSVVQLSHKANFGASHSASLSLQMFTDSSTVESISLQCACSLKAMIMCQGCGAFCHDDCIGPSKLCVLCLVVR

SEQ ID NO: 318 - protein, 1341 aa, Homo sapiens
SPSSSSSGSLALGSAAIRGQAEVTQDPAPLLRGFRKPATGQMKRNRGEEIDFETPGSILVNTNLRALINSRTFHALPSHFQQQLLFLLPEVDRQVGTDGLLRLSSSALNNEFFTHAAQSWRERLADGEFTHEMQVRIRQEMEKEKKVEQWKEKFFEDYYGQKLGLTKEESLQQNVGQEEAEIKSGLCVPGESVRIQRGPATRQRDGHFKKRSRPDLRTRARRNLYKKQESEQAGVAKDAKSVASDVPLYKDGEAKTDPAGLSSPHLPGTSSAAPDLEGPEFPVESVASRIQAEPDNLARASASPDRIPSLPQETVDQEPKDQKRKSFEQAASASFPEKKPRLEDRQSFRNTIESVHTEKPQPTKEEPKVPPIRIQLSRIKPPWVVKGQPTYQICPRIIPTTESSCRGWTGARTLADIKARALQVRGARGHHCHREAATTAIGGGGGPGGGGGGATDEGGGRGSSSGDGGEACGHPEPRGGPSTPGKCTSDLQRTQLLPPYPLNGEHTQAGTAMSRARREDLPSLRKEESCLLQRATVGLTDGLGDASQLPVAPTGDQPCQALPLLSSQTSVAERLVEQPQLHPDVRTECESGTTSWESDDEEQGPTVPADNGPIPSLVGDDTLEKGTGQALDSHPTMKDPVNVTPSSTPESSPTDCLQNRAFDDELGLGGSCPPMRESDTRQENLKTKALVSNSSLHWIPIPSNDEVVKQPKPESREHIPSVEPQVGEEWEKAAPTPPALPGDLTAEEGLDPLDSLTSLWTVPSRGGSDSNGSYCQQVDIEKLKINGDSEALSPHGESTDTASDFEGHLTEDSSEADTREAAVTKGSSVDKDEKPNWNQSAPLSKVNGDMRLVTRTDGMVAPQSWVSRVCAVRQKIPDSLLLASTEYQPRAVCLSMPGSSVDATNPLVMQLLQGSLPLEKVLPPAHDDSMSESPQVPLTKDQSHGSLRMGSLHGLGKNSGMVDGSSPSSLRALKEPLLPDSCETGTGLARIEATQAPGAPQKNCKAVPSFDSLHPVTNPITSSRKLEEMDSKEQFSSFSCEDQKEVRAMSQDSNSNAAPGKSPGDLTTSRTPRFSSPNVISFGPEQTGRALGDQSNVTGQGKKLFGSGNVAATLQRPRPADPMPLPAEIPPVFPSGKLGPSTNSMSGGVQTPREDWAPKPHAFVGSVKNEKTFVGGPLKANAENRKATGHSPLELVGHLEGMPFVMDLPFWKLPREPGKGLSEPLEPSSLPSQLSIKQAFYGKLSKLQLSSTSFNYSSSSPTFPKGLAGSVVQLSHKANFGASHSASLSLQMFTDSSTVESISLQCACSLKAMIMCQGCGAFCHDDCIGPSKLCVLCLVVR

SEQ ID NO: 319 - protein, 60 aa, Homo sapiens
VGRGRAPGIRKLLGCSNDTKTDSAGHRGRRTKGNEKWDFPSRMPQCYATFQFKRRRGVVL

SEQ ID NO: 320 - protein, 57 aa, Homo sapiens
MTPKQILQVIEAEGLKEMRSGTSPLACLNAMLHSNSRGGEGLFYKLPGRISLFTLKR

1. A method of preventing or reducing the development of clonal hematopoiesis of indeterminate potential (CHIP) in a subject, the method comprising administering a Lymphocyte Antigen 75 (LY75) inhibitor, a Cluster of Differentiation 164 (CD164) inhibitor, or a Poly(ADP-Ribose) Polymerase 1 (PARP1) inhibitor, or any combination thereof, to the subject.

2. The method according to claim 1, wherein the subject is at risk of developing a hematologic cancer, a myeloid neoplasia, a lymphoid neoplasia, an atherosclerotic cardiovascular disease, a coronary heart disease, a myocardial infarction, or severe calcified aortic valve stenosis.

3. The method according to claim 1, wherein: i) the LY75 inhibitor comprises an inhibitory nucleic acid molecule that hybridizes to an LY75 nucleic acid molecule; ii) the CD164 inhibitor comprises an inhibitory nucleic acid molecule that hybridizes to a CD164 nucleic acid molecule; and/or iii) the PARP1 inhibitor comprises an inhibitory nucleic acid molecule that hybridizes to a PARP1 nucleic acid molecule.

4. The method according to claim 3, wherein the inhibitory nucleic acid molecule comprises an antisense nucleic acid molecule, a small interfering RNA (siRNA), or a short hairpin RNA (shRNA).

5-26. (canceled)

27. The method according to claim 1, further comprising detecting the presence or absence of an LY75 variant nucleic acid molecule, a CD164 variant nucleic acid molecule, or a PARP1 variant nucleic acid molecule, in a biological sample from the subject.

28. The method according to claim 27, further comprising administering a therapeutic agent that prevents or reduces development of CHIP in a standard dosage amount to a subject wherein one or more of the LY75 variant nucleic acid molecule, CD164 variant nucleic acid molecule, or PARP1 variant nucleic acid molecule is absent from the biological sample.

29. The method according to claim 27, further comprising administering a therapeutic agent that prevents or reduces development of CHIP in a dosage amount that is the same as or less than a standard dosage amount to a subject that is heterozygous for one or more of the LY75 variant nucleic acid molecule, CD164 variant nucleic acid molecule, or PARP1 variant nucleic acid molecule.

30. The method according to claim 27, wherein the LY75 variant nucleic acid molecule, CD164 variant nucleic acid molecule, or PARP1 variant nucleic acid molecule is a missense variant, splice-site variant, a stop-gain variant, a start-loss variant, a stop-loss variant, a frameshift variant, or an in-frame indel variant, or a variant that encodes a truncated predicted loss-of-function polypeptide.

31. The method according to claim 30, wherein the LY75 variant nucleic acid molecule encodes a truncated LY75 predicted loss-of-function polypeptide, the CD164 variant nucleic acid molecule encodes a truncated CD164 predicted loss-of-function polypeptide, or the PARP1 variant nucleic acid molecule encodes a truncated PARP1 predicted loss-of-function polypeptide.

32. A method of treating a subject with a therapeutic agent that prevents or reduces development of CHIP, wherein the subject has CHIP or is at risk of developing CHIP, the method comprising the steps of:
determining whether the subject has an LY75 variant nucleic acid molecule, a CD164 variant nucleic acid molecule, and/or a PARP1 variant nucleic acid molecule by:
obtaining or having obtained a biological sample from the subject; and
performing or having performed a sequence analysis on the biological sample to determine if the subject has a genotype comprising the LY75 variant nucleic acid molecule, the CD164 variant nucleic acid molecule, and/or the PARP1 variant nucleic acid molecule; and
administering or continuing to administer the therapeutic agent that prevents or reduces development of CHIP in a standard dosage amount to a subject that is LY75 reference, CD164 reference, and/or PARP1 reference; and/or administering an LY75 inhibitor, a CD164 inhibitor, or a PARP1 inhibitor, or any combination thereof, to the subject;
administering or continuing to administer the therapeutic agent that prevents or reduces development of CHIP in an amount that is the same as or less than a standard dosage amount to a subject that is heterozygous for the LY75 variant nucleic acid molecule, the CD164 variant nucleic acid molecule, and/or the PARP1 variant nucleic acid molecule; and/or administering an LY75 inhibitor, a CD164 inhibitor, or a PARP1 inhibitor, or any combination thereof, to the subject; or
administering or continuing to administer the therapeutic agent that prevents or reduces development of CHIP in an amount that is the same as or less than a standard dosage amount to a subject that is homozygous for the LY75 variant nucleic acid molecule, the CD164 variant nucleic acid molecule, and/or the PARP1 variant nucleic acid molecule;
wherein the presence of a genotype having the LY75 variant nucleic acid molecule, the CD164 variant nucleic acid molecule, and/or the PARP1 variant nucleic acid molecule indicates the subject has a decreased risk of developing CHIP.

33. The method according to claim 32, wherein the subject is at risk of developing a hematologic cancer, a myeloid neoplasia, a lymphoid neoplasia, an atherosclerotic cardiovascular disease, a coronary heart disease, a myocardial infarction, or severe calcified aortic valve stenosis.

34. The method according to claim 32, wherein: i) when the subject is LY75 reference, the subject is administered or continued to be administered the therapeutic agent that prevents or reduces development of CHIP in a standard dosage amount, and is administered the LY75 inhibitor; ii) when the subject is CD164 reference, the subject is administered or continued to be administered the therapeutic agent that prevents or reduces development of CHIP in a standard dosage amount, and is administered the CD164 inhibitor; and/or iii) when the subject is PARP1 reference, the subject is administered or continued to be administered the therapeutic agent that prevents or reduces development of CHIP in a standard dosage amount, and is administered the PARP1 inhibitor.

35-36. (canceled)

37. The method according to claim 32, wherein: i) when the subject is heterozygous for the LY75 variant nucleic acid molecule, and the subject is administered or continued to be administered the therapeutic agent that prevents or reduces development of CHIP in an amount that is the same as or less than a standard dosage amount, and is administered the LY75 inhibitor; ii) when the subject is heterozygous for the CD164 variant nucleic acid molecule, the subject is administered or continued to be administered the therapeutic agent that prevents or reduces development of CHIP in an amount that is the same as or less than a standard dosage amount, and is administered the CD164 inhibitor; and iii) when the subject is heterozygous for the PARP1 variant nucleic acid molecule, the subject is administered or continued to be administered the therapeutic agent that prevents or reduces development of CHIP in an amount that is the same as or less than a standard dosage amount, and is administered the PARP1 inhibitor.

38-39. (canceled)

40. The method according to claim 32, wherein the LY75 variant nucleic acid molecule, CD164 variant nucleic acid molecule, or PARP1 variant nucleic acid molecule is a missense variant, splice-site variant, a stop-gain variant, a start-loss variant, a stop-loss variant, a frameshift variant, or an in-frame indel variant, or a variant that encodes a truncated predicted loss-of-function polypeptide.

41. The method according to claim 40, wherein the LY75 variant nucleic acid molecule encodes a truncated LY75 predicted loss-of-function polypeptide, the CD164 variant nucleic acid molecule encodes a truncated CD164 predicted loss-of-function polypeptide, or the PARP1 variant nucleic acid molecule encodes a truncated PARP1 predicted loss-of-function polypeptide.

42. The method according to claim 32, wherein: i) the LY75 inhibitor comprises an inhibitory nucleic acid molecule that hybridizes to an LY75 nucleic acid molecule; ii) the CD164 inhibitor comprises an inhibitory nucleic acid molecule that hybridizes to a CD164 nucleic acid molecule; and/or iii) the PARP1 inhibitor comprises an inhibitory nucleic acid molecule that hybridizes to a PARP1 nucleic acid molecule.

43. The method according to claim 42, wherein the inhibitory nucleic acid molecule comprises an antisense nucleic acid molecule, a small interfering RNA (siRNA), or a short hairpin RNA (shRNA).

44-138. (canceled)

139. A method of stratifying a suitable lung cancer patient for treatment with a PARP1 inhibitor, the method comprising determining whether the patient carries a DNMT3A R882H somatic mutation or TET2 somatic mutation deficiency, wherein the patient with the DNMT3A R882H somatic mutation or TET2 somatic mutation deficiency is excluded from a PARP1 inhibitor treatment regimen.
